United States Patent Application Publication US 2014/0141044 A1 - sequence listing, part 10

SEQ ID NO: 14074 - protein, 55 aa, BradyrhizobiumColbertium
MGVAFDAVAFHQDYALLSWFAEVVPAIGGDRHDAALERQIVALRHQAARASERRF

SEQ ID NO: 14075 - protein, 239 aa, BradyrhizobiumColbertium
MWRVFCDGTETLETMAKATRQRGFEYFGVADHSKSAHYAGGLSVEEIAQQHREADRLNKRFGKDFRILKGIESDILADGSLDYDGDVLERFDFVVASIHGRFKLDRKAQTQRLLRAISDPHTIIIGHMTGRQLQRRPGYEIDVEKVLRACAKHDVVVEINAHPWRLDLDWRWHQAALDFGCMLSINPDAHSIPELDHMHWGVEMARKGGVPADRVLNAMTLPEITRYLRQKRRSLARAA

SEQ ID NO: 14076 - protein, 71 aa, BradyrhizobiumColbertium
MPRGKMKHLQLVAGRIYNLLKKEAAYGPNVQHLEDFRAAQKLEASLDRRPSDRSGARLAPAAPQGSDREAG

SEQ ID NO: 14077 - protein, 296 aa, BradyrhizobiumColbertium
MPGFIEPQLATLKLKAPSGPQWIHEVKYDGYRIQLRIDDDDRRAYTRNGYNWISKFSRIAAAFDIKGQAIVDGEVVIIHDGRTNFSELQADLGRGDQDRLVYFAFDLLWRDGRDLRKEPQIERKRLLKDLIEEHDLKEPVLYSEHHEGDGQALFAAASKLNYEGIVSKRVDAPYRSDRVEAWQKIKVVQKGKFPVVGFIKDPSGVAALYLGKKEGKDLVYMGKVGTGWSRTTSAQIRKALDTVVSPKQKLTKIIRKPKATWVEPEFYADIEYRDITSEGLLRTSSFKGLSKGTRRS

SEQ ID NO: 14078 - protein, 101 aa, BradyrhizobiumColbertium
MDPEQRVAKALEDAQGILARHVEPGPRDCEQTINKLLDVLDDETVVQALKDSKMEKPTTEQLDELKRLSAIARVPDESEIVTSKEEAEIRIRDLKDKARME

SEQ ID NO: 14079 - protein, 278 aa, BradyrhizobiumColbertium
MTRLADDFEGAVGQIIGTVSSASTQLEASATTLTGTAERSQQLATTVAAASEEASTNVQSVASATEEMASSVGEISRQVQESARMAGDAVGQARATTDRVSELSKAAARIGDVVELINTIAGQTNLLALNATIEAARAGEAGRGFAVVASEVKALAEQTAKATGEIGQQISGIQAATNDSVGAIKEISSTIERLSEISSAIAAAVEEQGAATQEIARNVQQAAQGTQQVSSNITDVQRGATETGTASSQVLSAAQMLSNDSGRLKNEVSKFLANVRAA

SEQ ID NO: 14080 - protein, 207 aa, BradyrhizobiumColbertium
MSTGAARAGDDDEEDDMTFEERLIDNLMSGIGAKSMEKKGIEYRERSPLVVPPKLDLPPPATEAKAAPNWPKDPDERRRKEAIAARKKATKATESWQAAQPLTPAEMKSGQVAAAPRTSNDPIQPGTNSNPSLSPAELGFTGGLWNMMKGGSSSETKQFTSEPPRQSLVEPPPGYQTPSPNYAYGAGGPDKSRRMYYDIMSGKEKEQ

SEQ ID NO: 14081 - protein, 59 aa, BradyrhizobiumColbertium
MKRRKFSREFKIEAVKLVRERGVSVAQASRDLDVHENVLRKWVKEFGSDPAQAFPVMGK

SEQ ID NO: 14082 - protein, 71 aa, BradyrhizobiumColbertium
MPFEQVALVPVWAEVPHLFPDKYRAALAWAEEVTLVSETHASDDAYAAASAAFGPKDLADLTIICPVSDRG

SEQ ID NO: 14083 - protein, 170 aa, BradyrhizobiumColbertium
MKRQAHTLQSHATEQISRTLTTVELLWLEKRIENRVRFGRHVSEKILDRNRRVLSFAPGSVFAFVRWTSNDFGTILSRIDILRAVTPGQRYSTIPWITPGGESLLRLSGWPKVERVLQLIDAVEALGIDPADAAPDYWHHVHNRVSVNETPRPYTRSRHQAWLHRRRVTS

SEQ ID NO: 14084 - protein, 172 aa, BradyrhizobiumColbertium
MPIRPASLASSHTHVRLDLSELNEGQFRQAQDGWHAVLYLRGVEHRVWFKEAPIVAATYTVELPLDRDFEFRADAGRRLWRGLNGRPQGAPPHAISAHRRRRIALALRASDARSDGATYREIAEVLLSAVRIPERDWETHEARDRIIRLVKTGFALVQGGYRALLRPPPRKR

SEQ ID NO: 14085 - protein, 95 aa, BradyrhizobiumColbertium
MKKPPRDPDVADTAPTDSVLTVYDEEHIITYLRMLDADKEGADWREVAQIVLHINPEFEHDRAKRAFDTHLTRAKWMTEHGYRHLLRGGASNPNL

SEQ ID NO: 14086 - protein, 75 aa, BradyrhizobiumColbertium
MDLKEIMAMNLRRKRHDLDMTQEELAERAGLSLRYVGAIERADVSASVTVLGQIAEALGIEPGDLLRRAARSARS

SEQ ID NO: 14087 - protein, 59 aa, BradyrhizobiumColbertium
MGRAEIGAAWSKRSEEGRDYLSLKLDDPSFNAPIYANLFDDEGGEGYTLLWSRPRKNGE

SEQ ID NO: 14088 - protein, 642 aa, BradyrhizobiumColbertium
MTGAHGPRKHHNHIFFWDIGDKDGTDEAFAKADVVSKDMFTYHRVHPSPLETCQCVASMDKIKGELTLWGTFQAPHVIRTVVSLISGLPEHKIHVIAPDIGGGFGNKVGAYSGYVCAVVASIVLGVPVKWVEDRMENLSTTSFARDYHMTTELAATKDGKILAMRCHVLADHGAFDACADPSKWPAGFMNICTGSYDMPVAYLSVDGVYTNKASGGVAYRCSFRVTEAVYAIERAIETLAQRLGMDSADLRIKNFIQPEQFPYHAPLGWEYDSGNYPLAMKKAMDAVGYRALRAEQKQKQEAFKRGETRELMGIGISFFTEIVGAGPSKNCDILGVAMFDSAEIRIHPTGSIIARMGTKSQGQGHETTYAQIIATELGIPADDIMIEEGNTDTAPYGLGTYGSRSTPTAGAATAVAARKIKAKAQMIAAHLLEVHEGDLEWDVDRFRVKGLPEKFKTMKEIAWASYNSPPPNLEPGLEAVNYYDPPNMTYPFGAYFCVMDIDVDTGVAKTRRFYALDDCGTRINPMIIEGQVHGGLTEAFAVAMGQEIRYDEQGNVIGASFMDFFLPTAVETPKWETDYTVTPSPHHPIGAKGVGESPHVGGVPCFSNAVNDAFAFLNAGHIQMPHDAWRLWKVGERLGLHV

SEQ ID NO: 14089 - protein, 295 aa, BradyrhizobiumColbertium
MRHHIPRDRIADRLAAAGYIPDRDLATAVWLMEHLSRPLLLEGEAGVGKTEVALALARANDARLIRLQCYEGLDQNAALYEWNYQRQLLAIKARETHADAADVVEDHIFSEKFLLERPLLSSIRQPKSPVLLIDEVDRADEEFEAFLLELLSDFQVSIPELGTIRATTIPHVVLTSNGTRELSDALRRRCLYHYVDFPDVEREARIITARMPDIDVDLALQIARMVEAIRKEDLRKSPGVAETLDWAAALAGLGIDDLRAEPEVVFETMMCLIKTAEDKSRMTREVSDRLLGKVA

SEQ ID NO: 14090 - protein, 445 aa, BradyrhizobiumColbertium
MDAADVREKDYFIWDDELPGFGLRVFASGKRSYLIQYRAVGRTRRYTIGLHGVWTPETARQEAKVQLGRVARGDNPSEERQLDHKAITVKELCALYTADLNAGLILGKGGRPKKPTTIVTDTGRIERHIIPLIGARRVKDLTKADINKVLKDIMAGKTRVAVKTKKLRGKAIVRGGAGTATRTVGLLGGILTYAVDAGIIEVNPAHGIKKPKDNVRNRRLTEAEYRTLGQMLRDAAANEKYAMTVDIIRQIALTGCRRSEMISLMWIEADTDASCMRLVDSKEGESIRPIGLPVVEYLEERRKTAAGTYVFPGQGEDHAFGSFPNHWEQIFSDSPLAGVTPHVLRHSFASIANDLGFTEVTIAALVGHSKGSVTSKYIHTLDTALIMAADTISGYIQGLLEGIEFKQTAYALDRDSRRAALDLFLTKAVGEPGNEAEDEERRLAA

SEQ ID NO: 14091 - protein, 57 aa, BradyrhizobiumColbertium
MRLAISHWSASNSSPPTMQSKKLFEEIDDLRFGAIGDQVICSEPADHPDTPAHRAQP

SEQ ID NO: 14092 - protein, 1034 aa, BradyrhizobiumColbertium
MPFRGLFIGIDRYSSTGIDELTCARRDATALEALFFDTLGGSTVLLADAEATRQRIEDAFADLAGCGPEDTVVIAFSGHGSETHELVTHDANPDDLAGSAIPLELLQEWFSRIPAKRLILFLDCCFSGGIGAKVLHVDAKPRSLLSAEARLAQLGGAGRIIFTASAATEPAYEHRRFGHGFLTHFLLEALCGAEEVVSGGKLSLYRLLEHVTSRVRAAALQGGKEQNPTMRGSIDGDVAWPVFVPGAKYRAAFPARLPAKVTSDLASLSSAGFPDALVTAWAGAIPSLNALQISAITDFGVLDGENLVVSAPTSSGKTMVGELAALRNVLDRKRALFLLPLKALVADKRRHFESVYGGFGVRTVEATGETDDIAPLLRGQYDVGLLTYEKFAAIALTFPHVLAQVGAIVIDEAQMIADRGRGANLEFILTLIRMRRREGIEPQLIALSAVIGDTNGLEQWLGARLLRRTERPVPLEEGLLLGTGHFRFLDPENGNEQVEGPLVRRLVGGKGSSQDWIIPLVRKLVAEGQQVIVFRETKGEARGCANYLAESLGLPPAAEALTQMPGGDPSQASADLRSALGRGVAFHNSDLDREERRVIEEEFRRSGSGLRVIAATTTLAMGVNTPASSVIIAGLNHPGDEPYSVAEYKNLVGRAGRLGFAEKGASYLLALDPRAEHDLWSRYVTAEPEDLVSRFLDGTTDPRSLIIRVLVAAQRAAGEGVPSEEIVEFLESSFGAFQARRAHSAWQWSRPDLLSALADLERHGLVQKNATGAYELTKLGRLAGESAAEVGSIVALVDCLGSLQPQEISDPVLIAAAQTTVEVDQLLFPINRKSTQKEPQLWPNELQRQNVPWHVLNALQRGTTEDHQATLRAKKAVACLLFVSGRAMSEIERVLTQFGGAFGGAAGPIRAVAARTCDLMPVAARVAEILHPTLDLGDRVRRLAIRLTYGVPSAAVDLAQFAGADLLRGDYCRLAAAQLCEPEQIDAANDDQILACVDKDRRKLALVRDAAKRVAKRRAEAVAPSAPILEVYVP

SEQ ID NO: 14093 - protein, 78 aa, BradyrhizobiumColbertium
MDATEFKPGDLVRVKSGGPIMTVEQVGKTAMLEEDAVWCVWFEKVGNKQVARKDTFAPVVLEKAEKPRAAFSVGVVRA

SEQ ID NO: 14094 - protein, 146 aa, BradyrhizobiumColbertium
MIRHKRLEHRFVEHIPERLEAGILYVSMEYATSAHSCCCGCGEEVVAPFTPTDWKMTFDGETVSLRPSIGNWTLKCRSHYVIDRSKVIEAGPWSDEQVEAERRRDRAAKARFYGQTPAIELAVQPAPVKAAPGFWRRAWRWLSGRS

SEQ ID NO: 14095 - protein, 390 aa, BradyrhizobiumColbertium
MSRALFSRNPDLKRLRDEGYFVQQQGGYLVMREVPYVDARREVRIGTLISSLTLAGDQTRPPDTHVIHWDGDFPCHADGRPIQGISHAAGAFDLGHGLKATHSFSSKPDGGYSDYHHKMTSYANILAGPAAVLKSGATPRTFREPEEEEDSVFNYVETASDRVGIGVLTERLVNERVAIIGVGGTGGYILDFVAKTPVREIRLFDSDEFLTHNAFRAPGAPSLEELREAPKKVEYLKRIYSRMHRNIVAHDVALGVDNIHLLDGVTFAFLSLDAGDAKRLIVEKLEAIGAAFVDVGMGLELDEGSLGGILRVTASTPEKRDHARQRISFVGGGAKDIYASNIQVADLNALNAVLAVVKWKKIRGFYRDLEREHHCTYTTDGNMLINGDLA

SEQ ID NO: 14096 - protein, 248 aa, BradyrhizobiumColbertium
MNTEELLDYDDLGNALREGRALRPARGYRFLLAQGDLNFQSRVVSDPVPLGRQLLEAAALDPRDGYSLIAILPSGDFEDVRLNEPFDLRERGAERFIAFQTDRDFKLTLNDHELLWGKPVISGTVLYGLAKPGEGEAVFLEVPGGEDRLIEHGELIDLVQPGIERFITARLTFEIIVNSRPRTVNARTVTFEQIVQLAFPGQHEPNVVFSMTYRHAASTPPAGELGVGGSVDVKKKGTVFNVTRTVQS

SEQ ID NO: 14097 - protein, 1133 aa, BradyrhizobiumColbertium
MDSVELARQVAAELHARLVASGADPWSPYDFAVAEAKRRGIDVERTAAGAAVLNGGRATFVAADDLILHENMGSPFEQAFLVAHEIGHVELGDDPGGEAAPMIDPARPAEPSPVGMDRVVDYGRRQRREVQMDLFARELLLPRTVARALHVDQGLAASAIAAKLGAPFEVVAQQLFDALLLPPVPPAATAAHVERPLNPLQAAAAAHRGEAYLLEAGPGTGKTQTLIARVEGLLGEGVDPRRILLLTFSNKAAGEMAERIARKRPEAAAAMWIGTFHAFGLDIIRRFHAELGLPKDPRMMDRTEAVELLEGEFPRLRLAYYRNLYDPTQIIADMLAAVSRAKDEVVDAETYAALADAMQAKAQDSDAREAAERAGEVARVYAAYEQLKRNAHCIDFGDLVALPVQLLEKEAAICAALQAQYDHVLVDEYQDVNRSSVRLLSALRPDGRNLWMVGDAKQSIYRFRGASSFNITRFGKEDFAGGNRGRLKRNYRSVPEIVASFSSFAITMRAGDADSGLDADRDANGHRPELRTVQRAEQQQVALADAIEELRRDGYAYRDQAVLCTGNEKLSTIGQDLERLGVPVLFLGSLFERGEVKDLLALLSILVDRRAMGLVRIACWRDFATSFADVVAVFDHLRAAEHAPAGWLRHGEAIPGLSDRGRQTVAKLATALDGFDQTASPWTVLATLLLDRTRIAARLGASEDLADRTRGIAIWQFLNFVRVQPAGRGLPITRLLDRVRRLVRLGDDRDLRQLPAAAQHLDAVRLMTIHGAKGLEFGGVHIPGLNSDTIPRTPPAPPCPAPDGMIAGAEGSALEAFRAGQAEEQECLFYVAQSRARDRLILYAPTEKSNGHNRPLSPFLDRLGATLTRRSLVPARPLPVAAEARDIDLVVDGRLRLGAPQIALYESCPRRFFYTHVLQVGGRRTATAFMHLHEAVRVVVEAVIASDGPVSEQALQDRIDAALAGEGLGEHGYRAEFRDLALAMLRFFLANRAEAVPEAPVALSLSFGGEEIIVRPDEVLVRPDGIRAVRRIRTGHMRSAEGKDVGAAALMLAVRQSFPGAVAELVHLSDGEAHALALSDRELKGRKDKLAKFLGDIRAGRFPAEVSSRTCPNCPAFFICGQTPDGPLQKKFV

SEQ ID NO: 14098 - protein, 192 aa, BradyrhizobiumColbertium
MSPGGGRPSREAVLDAFAVESEPGRSTLERYLRLYPEYAGELIDLSRELSREAYEDAAPLSATDRALIDAAWSQHAKVMPAAAADPFAALTVDDWRAVAQRLDVPRQVVTALRERRVSLVSIPRRFLAILADAMRSSVAQLESSWGPAHLIVARSYKADSKPVAGEQVTFEQVLIDAGVPAEKRARLLAEAD

SEQ ID NO: 14099 - protein, 285 aa, BradyrhizobiumColbertium
MNQLEGAFDTGQKADARGAGEAIVTPLRKRRLSGELYERDPKIEALIAELAVLPRDGLIARAEITKRSDPGYVPSECLVYFIRASRRDNNEVWFERLYRILTERVLRSLPRAESSDGKTESLTRGVVRDKVFGRFVELFSADRAAYDEKVDYFEVRFDGALASLRRDAQEKAWRDENRSQPLEYDEESGELSPEVEAAAGTHDPFAVSDFDDPSYRSRLDAAIEALPTEQSRIIHMLRQGFPIDSKEPDVMTIAKALGRSEKTVRTYRDKAFAALRAAMADGDER

SEQ ID NO: 14100 - protein, 359 aa, BradyrhizobiumColbertium
MNPAFDEVLAAGSDAMLSAFDTTALRLGTASQNIEKDFWVCWTLDALFNGLKEGGPRLLFKGGTSLSKGFGLINRFSEDIDVTVFRDDIGEPATIEELEALSSKKRRARLDAIKDACQAYINGPLRAELTQILQDRLQAAGLDAGAARVEADDADPDGQTLLIWYPAATPRSDYVRAAIKIESGAKSALDPNSEVPIKPYVDDDLPALDLTVPAVRTVDPERTFWDKVVILHGLRRWFDKRGELRGGGQRVSRHYYDLHQLAAARVGAAAIADPALGADCVAHARMFFNRPDFDLASAAPGSFALAPHDAMIEQLRVDYRAMQGMIFGDPPDFEAVLDSIGSLETRLNKKGDTGGGAAR

SEQ ID NO: 14101 - protein, 276 aa, BradyrhizobiumColbertium
MNTDSPDLKKAMLERIRADAPRKVWTPSDFVDLASRDAVDKALQRLTKVEILRRIDRGLYDQPGFNKLTQKPNPPDPRSVIDAVGRRDQTRMLVDGMTAANDLGLTDAVPAKIVVHSDARRRAIKLGNVTITFRPTAASKLFWAGRPAMRVVQALHWLRDLLVREGESDQVRRKLANLFEDPTVGPPLKADLTAGMTALPTWMWVFLKPLVESDAGVRRRHVDDDRDDADHDRHQQRTADDADDQRHAAVARPKRKPLSPQKAQTAKRGAARAVKT

SEQ ID NO: 14102 - protein, 209 aa, BradyrhizobiumColbertium
MQRLTEQILAHTEGLPEGAPIAAKSLLHLGNRAAVDQALSRLAERGRLMRAGRGVYLRPVSSRFGVRAPSVEKAVEALALQRGETIVSNGAAAANALGLTTQVPVRSVYLTSGRSRTMNLGQQVVELRHAPRWQLALADRPAGQAVRALAWLGPEKAEAALMTLKRKLPSSTFGELVAVAPQLPSWLARTVGKVAYGRRSHSQVGGLPI

SEQ ID NO: 14103 - protein, 397 aa, BradyrhizobiumColbertium
MNMQVLDARRDVSGGWKVDINRGERIGRVSSEWFSRPDDERYLSLAELGRTVRERTERSRTRVVESALIHVEASRTDPERLALILPGADKPIAPTHWSFGQLASQVGAPAAYLRQLPAALAGINLQYGLTAHRAEQIKTLETDDGRVELRAVTGPDYGRIYDHELVEAVQRIAGNGTGDTRWKVPGVLDWSTGVYNPRVDITKDTTTLYASDRDVFLFLVDDLNPIEAGKLADGSPDLYFRGFYAWNSEVGAKTLGIASFYLRAVCQNRNLWGVEDFEEISIRHSKYAASRFAHEAAPALLSFADSSPQPFITGIKAARERIVAHKDEERTEFLRRRGFSKAETGKIIDAVLAEEGRPPESIFDFVQGITAVARDKPHQDARLELEGKAKKLLDRAA

SEQ ID NO: 14104 - protein, 372 aa, BradyrhizobiumColbertium
MLEQAPAEYYIDESGNTGDLSTVKIDSYFVEQRMFALAAFGCTLDQDFTDKLGALKKAHRIQSSELKSKQAYDKPRFIFDLLDLLETRRAPIFIELVDKHFFVVVNIIERMVVPYVGECDTQPGALWMKGVMANYMALYAPPELAHAFAACCQSRDHAEIRELYKQIIRWAQGSGVPPTDVAAGIIRFARDSLKDFRKLPKAKAVERALPIPDKNPAGKLLWVLPNLTSFTNIYARINRFARKQVSGVTLFHDEQLQFGDILLHNKKLAEDLAQLGVKLPLQTADFEFSQAADLQFQRSHDSIGIQVADVLAGFIARYVQDAVWGGAPMHPDKVAIFRRLVATGDRSLGSGVNFVAPDNMIRFLGIEPRSNF

SEQ ID NO: 14105 - protein, 712 aa, BradyrhizobiumColbertium
MATAIQKITLSSAQDIPFNKLVLSQSNVRRVKAGVSIDELAESITRRGLIQSLHVRPVLDADGQETGMYEVPAGGRRFRALQLLVKQKRLTKTSKVPCVVSDANADILVDEVSLAENIERAPLHPLDQFRAFQAMREKGMTEEAIAAAFFASVQVVKQRLRLAAVSPSLLDIYAEDGITLEQLMAFTVTNDHARQEQVWESVRNSWQREPYQIRRMLTETAVRASDKRAVFVGIDAYETNGGCVLRDLFQDDDGGWLQDPALLDRLVADKLKASAEAIAGEGWKWIEVAMSFPYGATHGLREIVGTPLDLTADEQATIEALNAECAKLEAEYENADELPDEIDQRLGEIETALASFDERPVHYEPADIAIAGVFVSLDADGTLSIDRGYVRPEDEIANQAGDGEGEEQDGGDDDADYPASPSVQRAVITICGKPAEPEEEDEDDTIKPLPDRLITELTADRTLALRDKLATDPSVAFVAVLHKFCQDVFYGGSQYGFAMEVSVRGTTFHSQPEGLRDSVYAKAIEARHDSWRKRLPAKVADLWDGLAALTGPEQAELFAHCASFGVNALYERADRYGGRVSAHSVEQRIAEADRLSLAVGLDMAEAGWRPTVANYLGRVTKPRILEAVREGAGERAAQLIAHLKKGDMATEAERLLAETGWLPEPLRNSGADAESTEADSGEGDEALPDFLDGDDEETNTDDEEERHLAAAE

SEQ ID NO: 14106 - protein, 137 aa, BradyrhizobiumColbertium
MADYFTHFSCLLDVGTPETAARALDLYNQLSEDGASEEPPSDGFLLSIQPEHGGSKLWMRDDVTGDPERLIQFVIRCAAEFHLTGRWGFQYANTCSRPRLDGFGGGAHVLDLATGETVAWIYTNGWLAEVIDGGDGA

SEQ ID NO: 14107 - protein, 1437 aa, BradyrhizobiumColbertium
MNAHTLAAALPTAADQPTDAAAIHAAALLLLPHIERGERIDAAVLRTAMETAFGASDTAGAWDWKDAYDACEAATVLMLRKYGKALLRKAGSPAAAVPLFGKIAGLLPTHTRRSEEAQAFQQFSTPIPLGLAAITAAAITPADRVLEPSAGTGLLAILAEIAGGTLVLNELAETRAALISSLFPAIPVTRFDAAQIDDHLDPATVPTIVVMNPPFSVLANVEGRVADAAYRHLASALARLADGGRLVAITGANFGPDIPAWRDAFVRLQERGRVVFTAAVHGSVYAKHGTTVETRLTVIDKIPADEPSAFPASPGTAPDIATLMTWIAEHVPPRLAVAPAVQVMPTGATPRTVRGYLARTAATSATRVGLADPEGVPLAYEPVDWPPAEGARLSDAIYEQYGLQTIRIPGSQAHPTKLVQSAAMASVAPPKPSYRPTLPATIMDSLSDSQLETLIFAGEAHSDFLAGSWTIDDTFDVVAAAADDANGVVRFRRGFFIGDGTGVGKGRESASIVLDNWMQGRRKAVWISKSDKLIEDAQRDWSALGMERLLVTPLSRFPRGKPIALPEGVLFTTYATLRSDDRGEKVSRVKQIVEWLGSDFDGVIIFDEAHAMQNAGGGKGERGDVTPSQQGRAGLRLQHALPNARVVYVSATGATTVQNLAYAQRLGLWGGDDFPFSTRAEFVEAIEAGGVAAMEVLARDLRALGLYTARSLSFDGVEYELVEHELTAEQRRIYDAYAGAFAIIHNHLDAAMQAANITGSTGTLNRQAKSAARSAFESAKQRFFGHLLTSMKTPTLIRSIAADLEAGHSAVIQIVSTGEALMERRLAEVPTEEWNDIRVDITPREYVLDYLAHSFPVQLYEPFSDGEGNMSSRPVFRDGQPVESREAVARRTELIEKLASLPPVPGALDQIVQHFGADVVAEVTGRSRRIVRKGQRLVVETRAASANLAETQAFMDDMKRVLVFSDAGGTGRSYHAELSARNTRLRVHYLLEPGWKADAAIQGLGRTHRTNQAQPPLFRPIATNVKAEKRFLSTIARRLDTLGAITRGQRQTGGQGLFRPEDNLESHYARDALRQLYILIVRGKIEGCSLQRFEDTTGLKLMDDNGIKDELPPITTFLNRLLALTIDLQDVLFAAFEQLLTAKVEGAIAAGIYDIGLETLRAESFVVTDRQTIYTHPGTGAETSLLTIQQRERNRPMTAEEAMAWLDDPVAKLLVNERSHRAAVQLPAPSLMLDDGEIERRVRLIRPMEQHHASIRMMDESHWIAASRAEFTAAWNAEIAEVPAYSDSTIHIVAGLLLPIWKRLPNESSRVYRLQTDDGERIIGRRVSPAWVANATTVGTTNLSADHAYAALIEGKTILDLAEGLQLRRVRVMGADRIELSGFTDAMRERLRAFGLFSEIISWKLRFFVPVGADGATIIGKLIGTYPIQRVGEREAA

SEQ ID NO: 14108 - protein, 345 aa, BradyrhizobiumColbertium
MARLDASDLAQRLGRQAEAVCRHYLSNGHRQGNYWQVGDARNTKGRSMYVRLKDSPKGPAGKWTDAATGEHGDLLDVIRESCGLIDFKDVADEARLFLSMPPPAPEPSAFQPLAPAPHGSPEAARRLIRMSQPIAGTIVAAYLRQRGITDLRGAGNLYFHPHCYYRPDEHAPTETWPAMIAAVTDLDGMITGAHRTWLDSRRHDKAPFETPRRAMGDLLGNAVRFGAGGEVMAAGEGIETVLSIRQVVPNMPMVAALSAAHLAAILFPDTLRRLYILRDDDPAGDGARDSLIERANAAGIEAIVISPQLGDFNEDLRTLGIATLRSQTRVQLGPQDVARFMALAA

SEQ ID NO: 14109 - protein, 326 aa, BradyrhizobiumColbertium
MCFVAMKAATVAVHPTEHPMRDLDDYEPHHESSPTDHVLNELQLHGYRPFADEPDQRLLPDGNAVAGAVADIFDALIVTLEDTRLEPDLDDLLWSTVNVFHRAAERINRELDDNEQAQKRSQREQDGSEVKSVDLERLIAEGKTQVERQTAFELMRDQAAEHYERQVGKAWLPRSGSKVNHRNLTSAMIDSRDFIMAKKRAEQEVLLPPGPKIAVTGGLDFDNHHLIWAKLDQVHEKHPDMVLIHGKSPKGAEKIASLWARNRNVPQIGFAPDWTKHGRAAPFKRNDEMLQILPKGVLHFPGTGINDNLADKAKKLGIPVWKFGGA

SEQ ID NO: 14110 - protein, 134 aa, BradyrhizobiumColbertium
MKAAAAEWAADQGFDNQALHAIAIAIELLLKSYLLNVATDDVWNRANIGHDLAKALHYSAQAGLVPPSRIEWIISHLHPHFQRGGFQREPSRKWPPGFADDAGEVARQLAQTVRLHQRHGHIDSASSPEKTTPR

SEQ ID NO: 14111 - protein, 55 aa, BradyrhizobiumColbertium
MSFPDAHAFAFSLATTLMAVIVIFRAGDGTLSVTPANEYDGDVSEIVHEVDPFAP

SEQ ID NO: 14112 - protein, 146 aa, BradyrhizobiumColbertium
MIILGIVLSFAAIGILCWLLFTLAVFALPFFAGVTAGTWAYDTGAGWLGAILIGMLGAGLTLGVGQLLLGIVRPLWARLLIALAFVAPAAIAGFHATHGIVKHTMPSETWQLVFSVIGAVAVGVTAFARVAGMASTGPSSQGIAPA

SEQ ID NO: 14113 - protein, 107 aa, BradyrhizobiumColbertium
MATIGTFKKTGSNEFTGEIVTLSVQAKGVRIVPDTRATGENAPSHRVLVGRAEIGAAWSKRSNEGRDYLGLKLDDPSFNAPIYANLFDDEDGDTHSLIWSRPTRRGD

SEQ ID NO: 14114 - protein, 42 aa, BradyrhizobiumColbertium
MYESTRDQVRRALETAGIVLLSTDKGEGVLLLHERDDRPTRR

SEQ ID NO: 14115 - protein, 413 aa, BradyrhizobiumColbertium
MGGPPWVRWGRREAAGNEGHVGEAGPARCRANSGGPKFAHQESDGDRLKLPPMTKQRAIPTHHHRAGISKQGFGGVAGGRCLPVVATESADPKYDLRNFLLGRARAMTVEGLQHPAQPSTLLPCQSGVGRYGAAMEGGEQAGDRLEPVEAFQAERDEGAKRFGGSCLGRMNKRYALTVSEIENQMGLAADIDAYGGVDRRLGISACGRNIRRWAKNDGACVFLGKPDHLRFGRCLHRVYGEIATPTAARSRRSACADHFRCRRALENPCRRFRCGAAIPTRRRTRSCRRRAHSVPMNASRKHLVSSRSSLVFEFVGESGFPAGLFSGSQRAGKGWCRNGIAAITVRSGPSLDSRARSSTARGRDACHGPGGTAAAHVPYRGQRESGRLRANQLRRARNRAGADREPYARGHRP

SEQ ID NO: 14116 - protein, 93 aa, BradyrhizobiumColbertium
MRPDLAVLPPRYLRTKEAAEFLSLSARTLEKHRTYGTGPAYRKLGGRVVYAVDDLEAWAERGAVTSTSDPRGSVLPAKRHTPAPPAHAGRYAR

SEQ ID NO: 14117 - protein, 386 aa, BradyrhizobiumColbertium
MAARHQSLSERGQLDLFRALPGEFAARDAQDLMAYPFFSLSKSHRVAPIDFAAGNVSIRVEAVPDHGMATIWDADILIWAASQIVEARDAGLRTSRLMVATPYEILKFIGRGTSLRDYQRLKAALDRLQSTTVCTSIRQSAEGRRHRFSWINEWKERTNRNGKPDGIEMIVPDWFYQAVLDDALVLTIDRAYFDLTGGLDRWLYRLVRKHGGRQRNGWRFDFRHLHQKSGALSPYKRFAFELRDIIRRQPLPGYTLFLEIEAGGRTLLAFERTPPCGKAVKGFVPSGTRKRVPSGTGPSCQREPKHGLTHDSRTENRLANLESNRESNFEERAREVENLVRQAANALSAAGKRRTSSAALTNAGAARNGTSGPPQLPFGPRPGGRR

SEQ ID NO: 14118 - protein, 212 aa, BradyrhizobiumColbertium
MIVAFLNQKGGVGKTTLALHLAGEWAGRGKRVTLVDADPQGSALDWSQQRAREHAPRLFGVVGLARDTLHREAPELARDVDHVVIDGPPRVAGLMRSALLAADLVLIPVQPSPLDGWASAEMLALLSEARIYRPELRARFVLNRCGARTVIARETAETLADHDPPVLRTAIGQRVIYADAAQSGRLAFEIDDDGPAAREIAALVTELERISP

SEQ ID NO: 14119 - protein, 84 aa, BradyrhizobiumColbertium
MSERSERRGFAARPTNQEAWIKAADATAPRAPDDEAFTARMTIDVTPALRGRIKIAAFRRGVTVADMLREMLAREFPHIEGDPT

SEQ ID NO: 14120 - protein, 173 aa, BradyrhizobiumColbertium
MTGAAAPRARGGPTPTARHQDNLTHVELTWVEKKIENWIRFGTHAHEQILDRRRRVLSFRPGAVFAFVRWASNDFGTIISRIDVVRSVARGETYQTLPFVRPGGEILLKVESWPRVERVLQAIDAIERIGIDPEAVSPDHWRHVHNRLAAGHEPRTYTLDHHRAFLLRRKAES

SEQ ID NO: 14121 - protein, 181 aa, BradyrhizobiumColbertium
MSRAGLLLATTLAALSVGYPGLTPMPIKLIWNASASAPIGFYSIDFDGPLDVTDLVAVDAPEPLATFLAERGYLPKGVPLMKRILAVSGQTVCRSNLTITVDGVEVGAALERDRAGRDLPVWQGCRRVQTGEVFLMNWQVRDSLDGRYFGLISTDQIIGRAVPLWTDEDGTGRFEWRAPTR

SEQ ID NO: 14122 - protein, 115 aa, BradyrhizobiumColbertium
MPQIGEFTRDETGFVGHLTTLVLNQDVIIIAAEPTEVENAPQYRVHVFDGMNNEPGAEIGAGWKRSGEKAGEYVALLIDDPTFPHPIRANMFRDDDGGSAWSLHWSRPRDRGEKD

SEQ ID NO: 14123 - protein, 221 aa, BradyrhizobiumColbertium
MPAITMAQDLGADRPSPRDPYGDHIAEASRRFGVPIAWIRAVMRAESAGDPRALSPKGAMGLMQIMPPTWAGLRLRHRLGADPYDPHDNIIAGAGYIRELFDRYGSPGWIAAYNAGPGRYEDSLKGRALPAETRAYVAIVAPSVTSGDATWPIVAAAADALAWTRAPLFIAQAERISIPVPVPAERASDAAMTTSSVRDVSAIEPQSGGLFVPRSGQRNAP

SEQ ID NO: 14124 - protein, 579 aa, BradyrhizobiumColbertium
MTGDSDFRIRPGRIRSTRAQQARPFIAQALAAAKKAGAGVSRSGRIVSGNRSRFGRGQRASIQANRLLTARTRGAVIKARVVRQTSRSAPLATHLNYLRREGVTRDGEKAHLFGPGGDDADPKAFAERCQDDRHHFRFIVSPDDAPDMADLRSFTRDLVTQMEKDLDTRLDWVAVDHWNTEHPHVHLIVRGVRDDGQDLVISRDYIKEGMRDRARDLITQELGPRTDLDIQRSLKRQVDAERFTQLDRQLIRDGHATGVIETAIDPNVRLDEFHALKVGRLRKLETLGLAEQVGPGQWAIDTKAEATLRELGERGDIIKRMHRALTDRGIERGSAGYVLAAESLDAPVIGRLVDRGLDDELKGSAYAVVDGVDGRTHHIKLPDLEAAGDSAAGSIVELRAFDDAQGQRRVAIAVRSDLDIDRQVTATGATWLDRQNIAREPAALSEAGFGAEVRQALDRRADHLVGQGFGERHGQRVTFNRGLIDTLRRRELEAAGEKLSAETGQPFNRAGSGEYVAGTYRQRLALASGRFAMLDDGLGFQLVPWSPSLEKHLGKHVSGVARDDGGIDWSFGRKRGLGL

SEQ ID NO: 14125 - protein, 662 aa, BradyrhizobiumColbertium
MSATKILWGQILTVFLIVLATTWGATEWVAWRLAFQPELGAPWFTLFGFPFYLPPSFFWWWYGFDAYAPAIFVEGAFIAASGGFISIAVAIGMSVWRAREAKKVETYGSARWAEKKEVETAGLLGPDGVVLGRYEHAYLRHDGPEHVLCFAPTRSGKGVGLVVPSLLTWPGSAIVHDIKGENWQLTAGFRARHGRVLLFDPTNTKSAAYNPLLEVRRGEWEVRDVQNIADILVDPEGSLDKRNHWEKTSHALLVGAILHVLYAEKDKTLAGVAAFLSDPKRPIESTLDAMMKTAHLGDAGPHPVIASAARELLNKSDNERSGVLSTAMSFLGLYRDPVVAEVTRRCDWRISDIVGGKYPATLYLVVPPSDINRTKPLIRLILNQIGRRLTEDLQAKGERHRLLLMLDEFPALGRLDFFESALAFMAGYGLKSFLIAQSLNQIEKAYGANNSILDNCHVRVSFATNDERTAKRVSDALGTATEMKAMKNYAGHRLSPWLGHLMVSRSETARPLLTPGEIMQLPPTDEIVMAAGTPPIRAKKARYYEDARFKERLLPPPALTTSQQGQPDDWTTHQLPARPQIAEATLLAQPADEDPTESERRQQPELNRVNPVEKKVPIDNPFEIDTDRDESDDDAVRTSRMNRLMQGVARQVSLDPGDGMEL

SEQ ID NO: 14126 - protein, 142 aa, BradyrhizobiumColbertium
MTKPPRKQRLSVYLDPSVMNRLADHAARRDHSRSLVAEAAIESFLSPDAAERQEAVITKRLDQLDRRMSRMERDIGISVEMLAVFVRFWVTTTPSLPEPAAQAARAKAGERYDQFVTALGRRLAKGPKLHQEISEDVDGEAE

SEQ ID NO: 14127 - protein, 116 aa, BradyrhizobiumColbertium
MSVRAMKFGAIEFLTKPFRDQDLLDAIYLGLQTSQIRRNEKTMTADLRARYDSLSVRERQVMDMILDGKLTKQIAAKFALSEITVKVCRAQIMRKMEAASLLELGRMSERLERIRD

SEQ ID NO: 14128 - protein, 339 aa, BradyrhizobiumColbertium
MLIGILTIGIFIIDTITPYEISAATFYVIVVLLSARFSHTRGMGTVSGICIALTIASYILTPSGSFGTGVVNTSISLLAIAATTYLAVKMETARVAAEQAQTRLAHVARITTLGEIAASIAHEVNQPLAAIVTNANACTRWIHGDPANLEKAASSIDSIVSDANRASEIIKRVQALSMRAEPKRSWIEINVVIREVLGLLQSRFRESRVSVYTNLSSDLPMIFGDRIQLQQVALNLLVNAIDAMGTLQSSVREIRINSAKSSASGVMITIEDTGGGIDPGFVRHLFDAFHSTKSDGMGIGLSICRSIIESHGGNIWAEPTNPRGATFCFTLPGDREKIL

SEQ ID NO: 14129 - protein, 92 aa, BradyrhizobiumColbertium
MAHAVAEKQKLLNRVRRLRGQVDAIERALIADESCGDVMRIVTATRGAINGIMAEVVNGHIQAHMVDANRTPTEAERNAALELVDVLHTYIK

SEQ ID NO: 14130 - protein, 71 aa, BradyrhizobiumColbertium
MAAHLNIDTRRAPPVVAHDDIQFAGVFPGLKLGARNLARPKLLAHWHQESDGRLIGGWQLETSATLKNPDD

SEQ ID NO: 14131 - protein, 123 aa, BradyrhizobiumColbertium
MVHHELTALHWRKPISVVVHGSIAGVGIIAEAWARRHGIAVVRYPPNWEFYGKKAEGLRCDFMLTDSRPDFVVAFPGGRHTADLVQRAINVGLAVLAIPPNTAGACPVAKHPPQRGQPTTASL

SEQ ID NO: 14132 - protein, 588 aa, BradyrhizobiumColbertium
MSDTSATSLEQIELASSAPAVLDSAHIGDIHGAFGTIRQHDTGVRKTWRARLATLMAIVGPGLIVMVGDNDAGAFGTYTQAGQNYGTSLLWTLMLLIPVIYVNQEMVSRLGAVTGVGHARLIFERFGKFWGAFSLIDLVLLNGLTIVTEFIGIVFALQYFGLPRVPGLIVAAVLIVAAVSTGSFKRFERFAMVLVFGSLLLIPVLLAIHPPIGEIAHGLLVPQWPAHSDMAAVMLLVIGIVGTTVAPWQLFFQQSYVVDKRITPAFNGYEKVDLCLGILLVVIGAVAMMAFCAALFAGRPEFGNFTDTGAVLTALDKYVGPYSATIFAIALLDACLIGAAAVSLSTSYAIADVLRVRHSLHRKVTDAIGFYVAYGILIFIAAGLVAFASDALLGLFVSAVQALAGVLLPSATVFLLLLCNDKAVVGPWSNGPKLNVFTGAIIWSLVLLSIILTVATVFPDVADSTILKILIGGSLLGLCGFVFSFAARKRSYDVPAAAYGNDQDHRFAKMTMLERRNWRMPPLNRLPALHMTLMTKVWMGVLRGYLLIAVALIGFKVFVAATGVEVSIPQIGGTPTSNDAATSNTGSK

SEQ ID NO: 14133 - protein, 41 aa, BradyrhizobiumColbertium
MFCVSFEKICHGFFLFDESQALARYPGVRFGGQINMFGSVG

SEQ ID NO: 14134 - protein, 338 aa, BradyrhizobiumColbertium
MTASHHNSEGLARGARMLRTALGPAIARYLDDASIVEVMLNPDGRLWIDRLSEGLSDTGERLSPADGERIVRLVAHHVGAEVHAGAPRVSAELPETGERFEGLLPPVVAAPAFAIRKPAVAVFTLDDYVAAGIMSATQAEILRRSVSSRANILVAGGTSTGKTTLTNALLAEVAKTADRVVLIEDTRELQCAAPNLVAMRTKDGVASLSDLVRSSLRLRPDRIPVGEVRGAEALELLKAWGTGHPGGVGTIHAGSAIGALRRMEQLIQEAVVTVPRALIAETIDLVAVLSGRGSARRLSELSRVEGLGLDGDYRIAPATTDGDGSSSLFVPAPEGESL

SEQ ID NO: 14135 - protein, 110 aa, BradyrhizobiumColbertium
MIQRLRRARHHLVLTVSIATLSAVMAAPAHASGSSMPWEQPLQQILQSIEGPVAKIMAVIIIIVTGLTLAFGDTSGGFRRLIQIVFGLSIAFAASSFFLSFFSFGGGALV

SEQ ID NO: 14136 - protein, 93 aa, BradyrhizobiumColbertium
MTGAVDQGGDVPGYTVPVHRALTEPILLGGAPRAIAIMNGTLAGAVGLGLRLWLVGIAIWAIGHVTAVWAAKRDPLFVDVVRRHLRVPAHLSV

SEQ ID NO: 14137 - protein, 499 aa, BradyrhizobiumColbertium
MMNLAEYRNRNSRLADFLPWVALVGSGIVLNKDGSFQRTARFRGPDLDSAVQAELVAIAGRLNNAFRRLGSGWAIFVEAQRQASNLYPDSRFPDPASALVDAERKADFEEAGAHFESSYFLTFTYLPPAEDAARAESWLYEGREKSGLDPNEVMTGFADRTDRILRLVEAFMPECRWLDDAETLTYLHGCVSTKRHRVRVPETPIYLDALLADQPLTGGLEPRLGASHLRILTVTGFPTATTPGLLDELNRLAFPYRWSTRAILLDKTDATKLLTKIRRQWFAKRKSIAAILKEVMTNEASVLVDTDAANKAADADMALQELGADYAGMAYVTATVTVWDEDPRAADEKLRLVEKVIQGRDFTAMAETINAVDAWLGSLPGHVYANVRQPPISTLNLAHMIPLSAVWAGPERDEHFAAPPLLFGKTEGSTPFRLSLHVGDVGHTLIVGPTGAGKSVLLALMALQFRRYARAQVFAFDFGGSIRAAALGMGGARHGRRLA

SEQ ID NO: 14138 - protein, 324 aa, BradyrhizobiumColbertium
MGGDWHDLGGDLSDGATDNVSLQPLARVHDVPERAWAGDWIVSILTREGVAITPEVKEHIWTALTSLASAPVEERTITGLVVLLQSNDLKQALRPYCVGGPYGRLLDAEREYLGSAFVQAFETEGLIGTGAAPAVLSYLFHRIEDRLDGSPTLLIIDEGWLALDDDGFAGQLREWLKTLRKKNASVIFATQSLSDIDGSAIAPAIIESCQTRLLLPNERAIEPQITAIYRRFGLNDRQIEIIARAMPKRDYYCQSRRGNRLFELGLSDVALALCAASSKTDQAAIARIVAEHGRDGFLAAWLDHREVGWAADLIPTLTNKETSQ

SEQ ID NO: 14139 - protein, 253 aa, BradyrhizobiumColbertium
MKLRNSRAARFAAALLTAPVALAPMLATPAHAIIVFDPSNYAQNVLTAARSLQQITNQITSLQNEAQMLINQARNLASLPFSSLQQLQQSVQRTQQLLNQAQNIAYDVQQIDRMFQQKYGNVSLSASDQQLVTDARSRWQNTVGGLQDAMRVQAGVVGNIDTNRTQMSALIGQSQGATGALQATQAGNQLLALQAQQLADLTAVVAANGRAQALQSAEQAAAAEQGREQRRRFLTPGSGYQPGNARMFPNSGN

SEQ ID NO: 14140 - protein, 133 aa, BradyrhizobiumColbertium
MDGKTLARVGAIVFVAVAITATAIEMNRKDVSTDVLATQGRPVTTSDPLAAELLRCSEIGEAGTRDPNCLKAWAENRRRFLGQPAPVSSPSPVAPTTLFPSAPASAAPIHKDSAPADVTGPAMQAEPAQPEVR

SEQ ID NO: 14141 - protein, 451 aa, BradyrhizobiumColbertium
MGGTGVIDHFLEVFTRYIDGGFGLLGGEVGFIATTLIVIDVTLAALFWSWGADDDIMARLVKKTLFVGVFAYLISNWNNLARIVFESFAGLGLKASGTGFAVSDLMRPGKVAQTGLDAGRPLLDSISSLMGYWSFFENFIQIACMFFAWALVLLAFFILAIQLFVTLIEFKLTTLAGFVLIPFGLFGKSAFMAERVLGNVISSGIKVLVLAVIIGIGSTLFSEFTSGFNGATPSIDDAMAIVLAALSLLGLGIFGPGIANGLISGGPQLGAGAAIGTGLAAGGVVAAGAAAAGAVVTGGAALAGGAAAAARGGAALAGGASTAYSLGAAGQAGASGVASGLGSVASTGAKAAVSPLKRAAGRAADSLKQSYQAGGQAATEIATGASGAATTATAEAASPGAASSTSDGPPAWAKRMKRSQQMSHGVQAAAHAVRSGDSHGGGSSVNLSESD

SEQ ID NO: 14142 - protein, 227 aa, BradyrhizobiumColbertium
MFKRPSTHYGKAPQPETPYQRAAQVWDDRIGSARVQARNWRYMAFGSLALAGGLSAALVWQSANGSIVPWVVQVDRLGQAQAIAPATADYQPNDPQIAFYLARFIEQVRSIPSDAIIVRQNWLRAYDFTTQGGALALNDYARANDPFTKVGKQQIAIEVSSVIRASPSSFRIAWIERRYQDGSLASTERWSAILTVVVQPPRDADTLRKNPLGIYINAINWSKELGQ

SEQ ID NO: 14143 - protein, 325 aa, BradyrhizobiumColbertium
MPGILLAGSALAGCATHTPPPEISYDNAVPAVQTSDPPAPVRVVELPKPLPLPGQLKPIGKDGKPEPEPSDPAARVNQANAAARVQPVRNGFINSMQVYPFVDGALYQVYASPGQITDIALQPGEQLVGSGPVAAGDTVRWIIGDTESGVGAAKQVHILVKPTRAELMTNLVINTDRRTYHMELRATPSTYMASVSWQYPQDQLIALRRQNSQAEAAQPVSGGIDLARVNFRYEVTGDRAPWRPLRAFDDGKQVFIEFPRGIGQGEMPPLFVVGPEGDTSELVNYRVRGNYMIVDRLFAAAELRFGAGKNQKRVRISRTDGRPAS

SEQ ID NO: 14144 - protein, 418 aa, BradyrhizobiumColbertium
MSDERDPEKEEGRTPGSAPQPQPTDDDARPLTGEPAATMRLRAEPPRVTRLSRKVLAGLGLAASLGVGGALIYALQTRHSGQGQELYSTDNRSTPDGLAGLPKDYSGVPKLGPPLPGDLGRPILNAQNGGTVPPIGAPASGPTGPSPEEQRRAQELEAARTARLFASTETRPATAGASTQPTATATPSADLASLGLAPQPATPSAQDRQLAFLNQTPDKRTVSPDRVAAPASKNVLQAGAVIAAALITGIRSDLPGQITAQVTENIYDSPTGKILLVPQGTRVIGQYDSGVGFGQRRILLVWNRLIFPNGRSIVLERQPGADAEGYAGLEDGVDYHWGELFKAAALSTILSIGAEAGSSGQDSDIVRALRQGASNSVSQTGQQIVQRQLNIAPTLTIRPGLPVRVIVTRDLVLEPYGG

SEQ ID NO: 14145 - protein, 319 aa, BradyrhizobiumColbertium
MLEFRQIWYFLAAAEYGSFRKAALALGIQESAISRRVRDLEDELGASLFQRHNGGVCLTLAGQQFVRRARKALQQIDCGAKDVAAIGRSERGHIKVGIFSSLASGFLSDLLGAYGKEHASVRVEFFDGDPADHVASIRRLQLDVAFITGTTQWSDCETEQLWSERVFAVLPSDHPLSEKSELGWRDLVDERFIVSDGAPGSEIHDYLVQRLADLGRHPEIDTQYVGRDNLLSLVAIGQGVTVMSEAGTAAQFPGTAYRQLAGEVLPFCAVWSPRNDNPAWRRLLSLARSMSRSAAATIIQTVSAVLLTSSLSQIPDPWL

SEQ ID NO: 14146 - protein, 210 aa, BradyrhizobiumColbertium
MKNEPTADSRPQPIVYVIDDDRSVRAALEDLLASVGLQVRSYSSVAEFLESSMPDAPGCLLLDVRMPGQSGIDFHRQMPEYGIHLPTIFITGHGDITMGVNAIKNGAFEFLTKPFRDQDLLDAIQQAIEKDRRRRESEARSLDLNARWETLTPGERDVFKLVVKGLLNKQIAADLNVSEITVKVRRSHLMQKMQAKTIIDLVRMSDSLSV

SEQ ID NO: 14147 - protein, 354 aa, BradyrhizobiumColbertium
MLKIANDIRPGSALTLIAMGVAMAGIFIADTVTDYAIAAAVFYTAVILVATRILSGTAVVALACICVALTLISFFLTHSGAYEVGIVNTGISIVAIGVTTYLSLRMVAAKAEALEARDRLLRIARVTTLGQLSASIAHEVNQPLAAVVASGGACTRWLAQEPPNLDKARLALDRIVSDANRASQVIARIRALSKGEAPRRQPFDLREAVMEIATLSRGEIERGGVALQLDLHDGLPRVFADRVQIQQVISNLVLNATEAMSDRALPERRLRIAASQDGRDAIVLAVADSGTGLAPGAREHLFDAFWTTKEGGMGLGLTISQTIVEANGGQISAAPVPGGGTVFEVRLPRHMEAA

SEQ ID NO: 14148 - protein, 232 aa, BradyrhizobiumColbertium
MDWQSLGHTALTLGGAFLLGGLIGFERQWRQRLAGLRTNTLVALGAAIFVLFAGLFPGEASPTRVAAQIVSGIGFMGAGIIFKEGLNVRGLNTAATLWCSAAIGALCGAGFFFHALIATTFVIAVNAVLRPLVRLVERQSFAASPLDSAYAISIICHGEAEAHVRALLLRDLAGALHIRDLESTNIEDTNRVQVSATVRADTRQDRLLEQIIGRLSLEPLVTSARWRFEPGE

SEQ ID NO: 14149 - protein, 719 aa, BradyrhizobiumColbertium
MTYFTTHGLPNFTITTGLKVFRRRRVLFCRLMVIAFYLLALGLVAVLQVTKAHAQELQTTPGHPDAARLNTSGPQPILAMPTKAPGASRDNKVESGGPDWSGVYFGGHTGFGAGSLGPGTNPVLNQSVGLPPTVTGMIGGFQGGYNFQASDRWVLGAEADVTFVSPPDETRRIPAPFNTSLDVVGTVRGRIGYAFGPFLPYATGGLAWTRTNVDINGDDGSVLSKLGRWHAGWTAGAGVEMALGGPWTARVQYDYLDLASSTYRLDGAGLRDVSVRPRTQRFTLGLNYRLGDVASTLPRPPATVEMSPDWNIHGQTTFIAQGYPAIRSPYASSASLPGGGQVRETWTADAFLGVRLWDGGAFYFNPELAQGFGLNGTLGLAGFPNGEAQKGGAEFPKFRPQRYYLQQTFGLGGEQEDVADGPLQLAGRRDIDRVTVTVGRFAVGDFFDANAYAKDPRADFMNWAIWSSGAYDFPADLPGMTRGAVIELNRKDWAVRAGAFQVPREPNSDVLVFNGGGGGAVEFEERHSLFGQPGKVRIGAFINRGYTGAYRDAINLAQASPQTDINDAMTALRRNQNKYGFYGNIEQALTADLGLFARASWNDGRTEILSFTDIDRSISGGFSLKGSAWGRPADTIGVGAAVNGLSSAHRNFLAAGGTGLLIGDGRLRYGHESIVEAYYALRVNGWSTVTFDYQFVANPAYNADRGPASILSLRAHAEF

SEQ ID NO: 14150 - protein, 38 aa, BradyrhizobiumColbertium
MLWFHASDRFALVWLTSGNAAFAISPLCSTVRRNAAGI

SEQ ID NO: 14151 - protein, 904 aa, BradyrhizobiumColbertium
MNAPILKAALKPRGKDERKLSMKAVREAQNGLDDTFENVKGDRNGLIARDAIERLAKDGPNEVAQERRLPAVVQFFGAFKNPFIAVLLILAGISAVTDIWLRLQHGEDADPTKVTIIIVMVLASALMRFVQEYRSSAAAEALKAMVRTTATVLRRGSATSNPEAFEIPMREIVAGDIVRLSAGDMIPADVRLIESRDLFVSQAVLTGEAIPVEKYDTLGSVAEKSAASVASSEMNALDMPNVCFMGTNVVSGTATALVVATGARTYFGSLAKAIVGSRAQTAFDRGINSVSWLLIRFMLVMVPVVFVINGLTKGDWVEALLFGLAVAVGLTPEMLPMIVSSNLAKGAVAMARRKVVVKRLNAIQNFGAMDVLCTDKTGTLTQDKIILEHHVDVTGQPNADVLRLGWLNSYHQSGVKNLMDQAVVRFAGAEPAITNTAASYRKVDELPFDFVRRRLSVVVEGEDGDHLLICKGAVEEMLSISTHVRRGKDLIRLGDVERKNLAAMARAYNEDGFRVLVVATRGFVASEAKTHYAIADEADLTIQGFLTFLDPPKETAGPAIAALAEHGVKVKVLTGDNAVVSAKICREVGLEPGQAVLGRDIEKLDDTALRVLVEERTIFAKLTPLQKSRVLQALQANGHTVGFLGDGINDAPALRDADVGISVDSGADIAKESADIILLEKSLMVLEEGVLKGRETFGNIMKYLNMTASSNFGNVFSVLVASAFIPFLPMLSIHLLVQNLMYDISQLALPWDHMDKEFLSKPRKWDAKNIGRFMIWIGPTSSIFDITTFALMWFVFAANSPEHQSLFQSGWFIEGLLSQTLVVHMLRTQKIPFVNSTAALPVLLMSSVICVLGIYLPFSPLGAAIGLQPLPIAYFPWLAGTLLCYCLVAQLMKTVYIRRFGQWF

SEQ ID NO: 14152 - protein, 231 aa, BradyrhizobiumColbertium
MRALHKENHLIERIGWLRAAVLGANDGLISTSSLIVGVAAATAASHEILVAGVAGLVAGAMSMAAGEYVSVSSQADTEEADMARERRELATQPEAELAELAAIYEQRGVTPELARQVAEQMMAKDAFGAHARDELGLTSHVMAKPVQAAFTSAVTFASGATLPLAVALLSPAWTATWTVSIACLIGLGVLGAIGARAGGASIWKPTLRVVFWGAVAMASTATIGALIGRAV

SEQ ID NO: 14153 - protein, 1076 aa, BradyrhizobiumColbertium
MTRRILEWTTGRPATVMIIALLIAGLGIWSFVNLQIDVIPDITGVQVQINTTVPALAPEEIERLVTLPIERSMGGQPGLREMRSLTKTGLSQVTLIYQDGTDQLRARQFVNERLSAVRDMLPAGSSPRLAPITTGLGEIWYYTLEWAQPPSDLDERQQLMELFEAQEYIVRPMLRAIEGVADVNSNGGLERQFVIEPDLKKLTTAGITPSELAQAVGANVANAGGGTITKNGQRFTVRTEARVTTAEMIRALPVKFAGGVRPLTVADLATVTIGHAPRDGAATTNGKETVLGTVMMLVGQNSRDVARRVDAQLPNLRAALPKGMILQVQYDRSELVDRTIATVERNLGEGALLVAVVLLIVVGNWRAAFIVASVIPLAFLMMISGMHALGISGNLMSLGALDFGLVVDGAIVVVENTLRLMGEAQRLKGRELTADERRRIVINAAGGVARPVFFGMAIIALVYVPVLSLGGVEGKLFQPMAQAVMLALAAALIVTFTLVPALCARLLRGEKVRQPSVSEKEDSLPEITADNHITHNGGFAGLVIRGYRPVLDFALRHPAALLVPSAVLLAVALRIFLTLGSQFTPRLDEGSITAMVYKPVGMSLDRSLEIEQQTEREILRRFPQVTRTFSRIGTSAVATDPMPPNENDLYIFYKPLDQWPQGPDMPRNKSELVAAIEKAATALAPEQSFLFAQPIEMRFNEMLEGTRADLSVKIFGDDYDVLERLAAQAREELQGVPGTANAAFEAASRTHSVVVEINHDAMVRLGLGTAEVNRAIASAIGGDEVGFIADGEHRHAIVVRMPESLRADTKSILSLPLRVGASGLVPLDRVASLREMRTVEPILHDNGKRRAALMVNLNTSDIEGYVTAARARLDGKLALPESYRIEFGGQFRQLEAARARLMIVVPAALLMIFLLVYSALGSVRHAAVVYTGIPFAITGGVLALWLRDMPFSITAAIGFIAVSGIAMLNGLVLIDHINALRRKLPVIEAVRQAATDRLRPVLSTAMVAGIGFVPMAISQGAGAEVQRPLATVVIGGVLSSTVLTLLLLPAIYRWMERRSAAVVEREKQPLEVEVSA

SEQ ID NO: 14154 - protein, 424 aa, BradyrhizobiumColbertium
MLKLLLIIVRISTIILVTPAFAQQAAVLSIDALANSVVASNPERRFYFQQIGLAGVERDAADRLPDPEAAFELGERRMADGLTGAPKGAGPTYGLSIMQPLDFAGRGALRRAIAEHQIALARLGLAQFDATLASRARSLGYALFAAERKAAAARDVAARMRELARVVEQRDPAGIATTLDTAILDAGAITAERNAAMADSETSTIVYELNQLRGAPLKARLRIAPPDITLPGLPSVERMAQQAGINNFEIQSLRAQLQQQGLRVDLAQAARVPNVSVGPYFNRAKSDSRETNFGIRLTTTLPLWNSQAAGLAQELSRQSQGDAALLAANRRIARQVYEQAAYYEAKRRALAGWPAGATEKFAAAATAAADSYRQGAIPIATYVEMQRQYLDALSALLDTRREAMEAMLQLRALNGGRSFDGVSR

SEQ ID NO: 14155 - protein, 46 aa, BradyrhizobiumColbertium
MQREGKGVLTIFHMLNDKAKAGQPFLQAGANVLIVFDKKNANGHVS

SEQ ID NO: 14156 - protein, 516 aa, BradyrhizobiumColbertium
MWVVSTRWAANILNNDQIKPGLSIDGRYSLVRQLGLGLSGATWLARDTLASSDVVVKFFPKRTSAQGDYQRHLIALHSLLSGIPLARWAAPIAVGELDQFDYQILPFFNDYNSLADIIRNGTEGLRTNFHFIAEVAEALAELHAAQVVHADLKPSNILVRSDHEEVRLIDFGMIRRLDNAVELVSTWRYLHPVFREGASAHSERVHTDRITVSRGMLAGTPVDTYVDVYALGIISLELLTSQTSYDRPLTDRSVSDLIAKHNEAFTRLPGGLKARIANFVAQLLSVSPDREVIEARTAASIARSILSDIPSDVSFTTIEQRQLRAKHDQDAGTATAVVALRDIRANLEQETLVLFAEGNRQVSISAAEPEAAILDQVSEVFTSARERVKSAWRIGMAMTVICFSLIILMIVIAVVMSITTGSFAWGGIFGSLGVSSVIGTLIWRPYDRLFRATIFAQQIEVIHIRVIAGLRSIDRGEQLRVCEEAIASLSDVFKEHTVGDKSLATARRKPGRKKLT

SEQ ID NO: 14157 - protein, 172 aa, BradyrhizobiumColbertium
MNKLRSEAHRLPDLLRPNLRLVFVGTAASTRSAELGHYYAHPGNRFWRALHEAGITPRRYQPSEFASLIKLGIGFTDLSKTGAGMDHQIAPETIDIAGFRAKMEKHQPRAIAFTSKKAASLFYGRPSAAIALGRQTRDASLPEIFVLPSPSGAASGSWTLEPWRELAAWLCS

SEQ ID NO: 14158 - protein, 186 aa, BradyrhizobiumColbertium
MGEQPVETCGIVKALLARRAKRPPQAGEDGEIDGCDYEQEQRRHRCPDQAADLLEQAVAAKADDAECQQHGRDDDDGGMAEGEIEADAARRLTCLHQLAHDVVDGGDVIGIDGVAKAEHPGQQRGRHDGRPVAERREGPGPCSDVGGDKPAEQQRHSGLDRPQRQFRHAKHSVRYTPRPAISMIFS

SEQ ID NO: 14159 - protein, 357 aa, BradyrhizobiumColbertium
MANLADRGRMIRLASLKRLGFFTRLLDEAPAAERYRFAAEQIVHAERAGLDSAWIAQHHFHEQEGGLPSPFAFLGYAAAQTSRIRLGTGIVTLPLENAVRVAEDAAVLDLLCNGRFELGVGTGGNPSAFAAFGLDSAQRNEIFARNLEIVRTALLGKPLAGGDTLYPQRPQLDKRIWQATFSVAGGARAGKAGDGLMLSRTQPRSKEAPKATLAEIQNPIIDAYLGALPHGCEPRIMASRSVFVADDHGEAMRFAEIGLRRALPQFLKGGHARPGETLQEMIAAFDTHVGTADEVIASLRSDATLERVTDLVFQAHSVDAPHPYVLRSIDLVAEKVAPALGWTGTAASDGALAGSPG

SEQ ID NO: 14160 - protein, 74 aa, BradyrhizobiumColbertium
MTSTLEATSSPAVCSPVQHVGLGGVKEVRRARAAVAGLRGAGPIPRAALRHGRLPGTAAIDIIGTWPTSPTGVV

SEQ ID NO: 14161 - protein, 595 aa, BradyrhizobiumColbertium
MNENEIRKCIAEVKQGTLSRRSFIKTLAALGIAAPVASQILAWHDVAMADATLAYKPTKAGGGGTLKILLWQAPTLLNPHFALGTKDQIAARIFFEPLAGWDKEGNLIPCLAAEAPTKANGGLAADGMSVVWKLKQGVKWHDGKPFTADDVVFTWQYAADLATAAYTTGSYKDIKVEKIDDHTVKVNFRAPTPFWADPFVGSVGMVLPKHHFGDYVGAKSREAPGNLKPVGTGPYKFVEFKPGDMIRAERNPDYHIKNQPHFDTLEVKGGGDAVSAARAVLQTGEYDFAWNMQVEEEVLKRMEAGGKGKLDITPSGNVEFIILNTTDPWTEVDGERSSVKTKHPTLSDPAVRRAINLLIDRDSIQKFIYGRGAIATASFVNAPKQFKSPKLKYEFDIDKANKILDEAGWTRGADGIREKDGKKLKYVFQTSTNAPRQKTQAIIKQACQKAGIEIEIKAVTASVFFSSDVGNPDTYSKFYADMEMYNTTQPQPDPERLLNQCVSWEIATKDNKWLGRNNSRYSDPEADKAYKAAQNELDPVKRAALLMKVDEIFCGANVFLPLLSRHVVNASVNNLMIDISGWDTITWNVAAWHRS

SEQ ID NO: 14162 - protein, 141 aa, BradyrhizobiumColbertium
MECGRVASELRGGERLFLRRSASLGTLHRIPSTVCSRSQQNHAPSPTRIVHGRKQGNGGTHEAGKTINSYGLRKAVRVKNPAAFSLLSNGIGYGVQRTRTPRAYEAPEPFRSSRSSSIWRSASSQKSSSRLLGRPACSQSS

SEQ ID NO: 14163 - protein, 61 aa, BradyrhizobiumColbertium
MTDKACPFCQGIGWVCENHPLRVWSEKLGGCRCGEGMPCTCNTAEDPEVRVVIVEADTTWH

SEQ ID NO: 14164 - protein, 53 aa, BradyrhizobiumColbertium
MSEPTEQEIRERAHQLWEQAGKPEGREEEFWHAAEQDLRNEDKSNTLRTPDTL

SEQ ID NO: 14165 - protein, 2831 aa, BradyrhizobiumColbertium
MSTTPHVLANGDFLQDWSNTGLITTNDDWSGVASIVGYLGNDVVSATGVDARTATGSSSGDVDVIANQTNTAITNGGVAEFQIANPTLALNGSNSADAPGLVIHLDATGRKDVRLSFNARDLDGGTDDSAQQINVQYRLGSSGSWTNVPSGYAADTTTGGAATQVTPFDLLLPAAVDGRNDIQVRILTTNAAGNDEWVGIDDIRVTSSSESSVEAQHVSFAPGSLTVSHDEGNSGPTVYQFIVERSGGTTGDVAFSGTIASAQTDAADYVGGNPVSFSGSIAAGETSAIVTVTVAGDTDNEASESFTLTLQNVSNSVGVTTTIGSATTATGTIVNDDVGITKISAIQGSGASSAMVGQTVTVEAIVVGDFQNGDADAGRNLNGFYVQEETTDSDGNVLTSEAIFVYGGATDVQIGDRVRVTGSISEYFGLTELTASNISVVQAGAVADVDTMAVQIDLSAMGTTLSQDGDYQPDLEAYEGMLVTIPQTLTVTEQYNLDRFNEIKLTAGERPEQFTQESAPDAAAYQAYLAELGARTITYDDGLNVQNAAINNLDGFDPNDNPSATPNYGTADAVRMGDTVTGLTGVLDYQWAGNSASGATWRIRSVEDGANTFEAGANPRTDAPEDVGGRLKVASFNVLNYFTTLDNGGTTAIGEAPRGADNAAEFARQTEKLVATILDMDVDVLALTELENDFSAASSGNAIKYLVEQLNAVAGAGTYAWVDPGRQFVGGDAIAVGFIYDTTAVKIADGTTIETLNDADLPGLGLGGLIGQSTVGAVFDGENTSRNALAVTFEELATGETFTAIANHLKSKSGTGSGADSDQGDGQGNWQNQRELAAKALTAWAASDPTGSGDPDVMLLGDFNGYAKEQSTALIESAGYENLQDREDGAYSYVFDGQTGTLDYAFANASLGGQVSGVTTWHINADEADALDYNTDYGRDTSIFDGDSSIRVSDHDPVIVGLNLGEQEPTPAYTLQILHASDFEAGLNAVDRAGNFAAIVDYLEETYDNSITLSSGDNFIPSPFFSAGSDSSLKEVYETALETYYGLAAGTLNISPGFGTADMAMLNIIGVQASAIGNHEFDAGTKAFADIIKQTAGYPGAQFPYLAANLDFSADANLASVYPGTIQDADVYTGFPPVAGIGKKIAPATVIEENGEKIGVIGATTQIVQSISSTGGVEVIGDNVDDMAALAAILQPTIDGLLAQGINKIILVSHLQQLALEKALAPLLHGVDVIVAGGSHTLLADETDTLRVGETAADTYPIVAANADGKTTLIVNTSGEYSYVGRLVVDFDAEGNVIYTANSAVNGAYASTEEVVTSLYDGNTTVDVDHDGDVDTDDADPFADGGRGDLVNDIAQAVGGIIDAQDGNTFGKTDVYLEGRRSEARTEETNLGDLSADANLWYAQKVDPTVLVSIKNGGGIRDSIGYVYAVGGEAVESPPLANTSVGKEAGEVSQLDIANSLRFNNALSMVTVTADQLLKVLEHAVAATTATATPGQFAQVGGIAFSFDKDLPAGNRVQSAALIDDNGNPVLALVANGELVVDPKMAIRVVTLSFLLTGGDGYPFASFITANPTFANVVNLSPDLVPDAGQEANFATEGTEQDAFAEYMAANYSDTPYDVADTDRAHDERIQNLDYRQDTVLETEALVLVGDDGDNQLAGALGDDVLTGLGGDDVLAGLGGDDQLDGGEGDDTLSGGDGDDTLLGGAGDDTLDGGAGDDRLVGGDGDDTLTGGDGDDVLIGGEGYDTLQGGDGNDELMAGAGDTAEAGDGDDLIIVSTDDPAPGSIDGGAGNDTVKLIGGGTAELIATLNVENLLVAAGTWSVAGSASYDDVTIQGGAMLASSLVVDNNDHVAIEAGGALSVSGNAIVWQGGGNAVIDNAGEISGSTRALTTTAGATGSVTLDNQAGGVVRGALTPERAGHADATIIVNNAGVIEANGRVIDFRTFDNNGASAVINNLAGGVIRQHGSDTDVIRPGTDGVVNNWGTITTDPTFVGGGDLIDFQSDTGGKVTNYAGGWMEGSRHAVTGDNAVTVINSGTMIGRNGSAVNLDTDGTEAQKAFITNHGVMEGRSAELSDSDGDAIDVDGLVQIVNYGKISGLGAEGYHDGEPNVSEAIAIGGGSIVNNAGGEIYGYGRAIQVDNSSNANALGVTTIVNHGLIKGDGHGPEGVTPEDAARFDLRGNEAINLVGTYADSLTNSATGQIVGGVSMGGGSDTLSNDGSITATGGSAVNMGEGDDLIVNRAIITGDVLLGAGADELINQSSGVITGDVSFGDGNDRLGNTGKIVGKVDLGAGDDFVNIWIGSDIQGHILLGDGNDILISNDWISTKMEIDGGAGNDEIYTSFGNDTIHGGEGNDRIYANQGNDTVYGDAGNDEIYGNDGDDLIIGGAGDDIIDGGAGTDTATFSGAIAGYAMTLNADDSVNIADQAGTDGTDTLSNIEELGFADGTWTLRTGTGGSDTIVGGLGNDLVFGGAGDDTFIGGYGLDRYDGGDGVDTIDYSNISFKLTIDLDSGLAYYPGYIPGADHLAGIENAVGTAYDDTLIGSAGANTLNGGLGNDLLIGGAGDDVLLGGFGDDVLRGGAGDDTIDGGFGQDLLDLSDATGAVTINLVSGTATGAGIGTDHFSGIEGFVLGAGADHVTGGNGADMFDGGAGNDVIAGGAGNDTLRGGQGDDSVDGGSGNDVIEGGVGKDTLKGGSGVDVVSGGDGDDNIDGGSENDMLNGGAGNDTIKGGSGADILAGDAGNDILSGGSGADVFTFAAGFGKDTVTDFAATGGSADVLQFSSSLFADFAEVMSHTTQVGNNVVVTLDADNTVTLANMQMASLAADDFRFV

SEQ ID NO: 14166 - protein, 592 aa, BradyrhizobiumColbertium
MTATTSSASSPPSGDLASAALASCRTAFLTVGLFSAVLNLLMLSGSIYMLQVYDRVIPSHSIPTLIALSIAVAAAYAMQGLFDLLRQRILTRIGSALHAALWQPVVCNILRGPLRGGGANRGLQLSHDLDSVRSFLSGLGPTTLFDLPWMPLYLAGCFLLHPYLGWTLVVGAVLLFGIALLTEVLTRAPTRDASRAGAIRGVQLEAGRRNAEIVAALGMEQRLIDRIGAANDDLVAAQQRNADIAGSLGALSKALRFMLQSALLGLGAYLVIEGLASGGVMIAASIMGSRALAPVELAISIWRPFLGARQAGQRLRAALRNGDAPKPDVAPERAVHRLTVEQVTIAAPGGTTAIVHNASFVLEAGQAVGIIGPSAAGKSTLARALVGIWPIARGEIRLDGATLDQWPAEIRGGMIGYLPQDVELFDGTVAENIARFDREIDEAAVIAAAKAAGAYEMILKLPKGFEMRIGEAGATLSGGQRQRIALARALYKDPFMVVLDEPNASLDAEGDAALTDAIRRVRARGGIAVIIAHRPAALAAVDLVLTLAAGQVQAFGPKDEVLRKSLAAHPAPGGAALQAVPDARSVPAAAVS

SEQ ID NO: 14167 - protein, 440 aa, BradyrhizobiumColbertium
MTALSTPEARRNDPFRDIRRATGLGIGTLAIVVSTAGVWAMTAPLASAVIAPAQVVVDSNVRRVQHPTGGVVAEIYVNDGDQVRAGDMLVRLDETLSRANLALIENQLNQLGVRRARLQSEQNGRDAVVLPGEISARRAIGAITEMIEGETTLFARRREAISGQQSQLRERKAQIVDEIRGLEAQIASKREQIRWIETELEGVRQLYEKRLVPYARLTALEREASRLTGEEGQLIAEIARAKGRITETELQIIQLVQDQRREVATELRDVETKLADLGERRIAAMDQLDRVVLRAPQDGLIHQKSVFTVGGVITAGEQLMLIVPKDSLVVEARVDPQMIDRLKVGQSAKLRFSAFDAAVTPELDGTLTRIAADLTKDPQSGAAYYVARISLDASELAKLDGKALVPGMPVEAFIQNGVRTAIAYLRKPLEDQLARALRQK

SEQ ID NO: 14168 - protein, 41 aa, BradyrhizobiumColbertium
MLCQPSGVDPDMHDPAPSTDSNTPVIPPPGSPGGDPNVRPK

SEQ ID NO: 14169 - protein, 74 aa, BradyrhizobiumColbertium
MNADKTLTTLADAEAKFAAQGVTRDKSVICYCGGGISATIDLFLLAQLGFHELTLYDASMGEWARDPTLPIETD

SEQ ID NO: 14170 - protein, 216 aa, BradyrhizobiumColbertium
MEAALIDRARRRDETALREIMQANNRRLYRLARGILRSDSEAEDVVQETYVRAFTRLDGFLGESALSTWLSRIAINEALGRLRNRKPQVELESVPEATLEAEIIQFPLSSAAADPEKSMAQREIQRVVEQAVDELPEAYRMVFTARIMEGMSMEETAELLGIKPETVKTRLHRARTLLRENVEKKIGPVIMDAFPFAGRRCERLTEAVLRRLGVGA

SEQ ID NO: 14171 - protein, 177 aa, BradyrhizobiumColbertium
MLIRWSAAAAAAIMLSSPVLLQKASAADKPTDPQIAHIAYTAGVIDINAAKQAQKKAKSKNVKAFAEDMLRDHEAVNKQALALVKKLNVTPEDNEASKALSRQASDKLAELDKLDGTAFDKAYVANEVAYHKAVNGALETQLIPSANNAELKSLLQTGLKIFRGHQQHAEHVAAELK

SEQ ID NO: 14172 - protein, 106 aa, BradyrhizobiumColbertium
MKPGRLASTALAVVFLSMVVPAHAATIRITMEDLVISPADMSAKVGDTIEWINKDVFAHTATAKNGDFDVMLPPQKSATFVLKKAGTIDYYCRYHPNMKATLKVEP

SEQ ID NO: 14173 - protein, 88 aa, BradyrhizobiumColbertium
MSQPISYAPARAPLPDHEQKQAALSYLNEAWAEARHDGVDGDCLAQASLFAAFAELVGTYGEDAVAKFVEGFPGRIRNGEFSVGISRQ

SEQ ID NO: 14174 - protein, 125 aa, BradyrhizobiumColbertium
MTPRFLAVLAVILACASVPTKAQDGAAPFDGELQRLAEILGGLHYLRGICGANEGNKWRNEMQALIDAETPSGERRTRMIAGFNRGYNGFQQTYRSCTPAATVAIRRYIEEGSKISRDLTARYAN

SEQ ID NO: 14175 - protein, 144 aa, BradyrhizobiumColbertium
MAAVAQPTHPQLAVSAAIFRDGKVLLVRRARSPAKGFYSLPGGRVEFGESLHQALSREVDEETGLRIRIIGLAGWREVLPAAAGAGHYLIMSFAARWVANEPALNDELDDYRWVAPDALGGLGDLKLTGGLEEVIQSAHRLIGT

SEQ ID NO: 14176 - protein, 142 aa, BradyrhizobiumColbertium
MANINPRTGLATDYLNHFNEAVMLLEMVPDMPECAEDFLTWTPLSYAEHFTASNFKARDLAIEAYEKADPNVRAQFDHITDTMTSILTAVGSAMREVEKDSTRVRLAEQATLWVKPLIAACGGIINGGTEADVDTIMANSAG

SEQ ID NO: 14177 - protein, 240 aa, BradyrhizobiumColbertium
MRQLFGYVEQPNFPPRYNVAPTQPIPVVLVENGARHFRLMRWGLLPGWVKDPRGFTLLINARSETVLEKPAFKTAIRRRRGLIPADGYYEWKTEAGRKQPFFIHRADGEPLGFAAVFETWLGLNGEELDTVAIVTAAASEDLAALHDRVPVTISPRDFERWLDTSGDEVDAILPLMTAPRVGEFAWHAVSTRVNRVANDDEQLVLPISAEEIEAEAEAAKPKKARKVAAVSSDDGQGSLF

SEQ ID NO: 14178 - protein, 397 aa, BradyrhizobiumColbertium
MTRPFEGVKILDFTQVLAGPYASYQLALLGADVIKVERREGEDMRRTPLSREWAERGLAPAFQAVNGNKRSLTLDLQKPEAIAIVKKLAAQVDVVMENFRPGVMDKLGIGYEALSAINPKLIYCAVSGFGQTGPDRLRPGYDGKMQALSGIMAITGHPETGPTRAGFAVCDVLSGATAAFGVSSALYQRDRTGQGQLIDVSMLEATLAFLSGQIADWSVAGHRQELSGNQAVSRRTTANLFKCGDGHILLAVNNEKQYRALMSALGREDTLTDPRFTDWFARNENEPALRAIIEEALAQRPAREWETILEDAGAPCASIWKVEEVIDHPQIAARGAIQELDTPYGPLRFAGSGFRLAHGGGRLDRMAPELGADTDTVLGELGFDAAAIAGLRAREIV

SEQ ID NO: 14179 - protein, 309 aa, BradyrhizobiumColbertium
MSAPRDDEFGFAPDYDSPVPYMQRTRDYYAAIGYTTPYRWAHYTEAPFEPLKKPLAKSRVTIITTAAPFDPARGDQGPGAAYNGSAKFYQVYDGDTSKEHDLRISHIGYDRKHTSATDSGTWFPLPQLLKASAAGRIGEVAPRFFGAPTNRSHRVTLDTDAPEIFSRCLADAVDVAVLVPNCPVCHQTTALVARHLERNGIPTVIMGCAKDIVEHAAVPRFLFSDFPLGNSAGKPQDVASQAQTLELALTLLETASGPQTTMQSPLRWSEDASWKLDYNNVAQLSPEELARRRAEFDKQKEIARGNRAA

SEQ ID NO: 14180 - protein, 193 aa, BradyrhizobiumColbertium
MTISDRVRIKDVRVLSDNWTPLKTTTFEYRRANGEWQTQHRETYERDNAAAVLPYNLARRTVILVRQFRLPAFIRGYDDLLIEAAAGVLDDAAPEVRIRAEAEEETGYRLHDVHKVFEAFMSPGAITEKLHFFVAEYEPEMRVSDGGGLEHEGEDIEVLELSIDEALAMIADGRIIDAKAIMLLQYAALHVFR

SEQ ID NO: 14181 - protein, 148 aa, BradyrhizobiumColbertium
MSASLAIEAITDADVEGVVALWQRCGLTRPWNDPHTDIALARRCDNSTVLVGRANGAVVATIMVGHDGHRGWVYYVAVDPNCQKRGFGRLIMAAAEDWLRREGIAKLQLLVRRENAQANAFYGSLGFELSTSVMFQKWLDGRATTPSN

SEQ ID NO: 14182 - protein, 475 aa, BradyrhizobiumColbertium
MNIEKPAIPPLAPELIEQFRKIVGERHAITDANDIAPYVTEERNLFHGRSPLVLRPGSTAEVSAICKLASAHNIALVPQGGNTGLVGGQTPHNGEVVVSLRRLDKIREVDTASNTMTCEAGVVLQIAQQKAAEADRLFPLSLGAEGSCTIGGNLSTNAGGTAALAYGVAREMALGLEVVLADGRVLNTLSKLKKDNTGYNLHNLFIGAEGTLGIVTAATLKLFPKPRAIETAFVGLKSPDAALKLLTIAQGEAANALTSFELLSEMAVDFSVRHGIDVRDPLQAKHPWYVLMELSSPGEDARTPLETILARAMEEEIVDDAVIAASLAQRGAFWKLRDEMSAAQKPEGGSIKHDISVPVAAVPAFIAEADAAVVKLIPGARPVPFGHLGDGNLHYNVSQPIGADTADYLARWHEVNAVVFEIVLRMGGSISAEHGIGVLKRDELPEVKDKTAIELMRSIKAMLDPKGIMNPGKVL

SEQ ID NO: 14183 - protein, 329 aa, BradyrhizobiumColbertium
MKTGLETLILPAGAAGAEAAARTLAAGGLVAFPTETVYGLGADAANATAIAHLYAAKGRPAFNPLIAHVADLNAARRIGRFDARALSLAEAFWPGPLTLVVPKTEGCPVADLATAGLDTVAIRIPAHPVAQAILRAFGGAVVAPSANISGHVSPTLAAHVESDLSGRIDLIVDGGPVTVGVESTIVGCFDMPMLLRPGGLSRERIEAVLGLPLARPPVEAESDDSQPLAPGMLASHYAPRAHVRLDARDVAPDEALLAFGPARLPGVDAAAAVMNLSPTGDLDEAAANLFGYLRSLDARRPRAIAVMAIPEEGLGEAINDRLRRAAVAR

SEQ ID NO: 14184 - protein, 102 aa, BradyrhizobiumColbertium
MIAGRGLRDGWRSLSPAVAGFAWVMPLIGAALAARFAWLIGLSAGSTATLMTLGHPPRLTEEFERTGEADPGDGKRTTRSANRRDVRPVVHRRPADGSRLRQ

SEQ ID NO: 14185 - protein, 167 aa, BradyrhizobiumColbertium
MTPAIRSFVAGAAMLAGLVGPSVARAADIVDTAVSAGSFTTLVTAVKAAGLVKTLKSKGPFTVFAPNDAAFAKLPPGTVESLLKNKAKLAAVLKYHVIPGRVKAADVAGKSLNVATVQGQPVSVDGRFGVRVNDAHVIQPDIEASNGVIHVIDTVLLPPARAKKMHH

SEQ ID NO: 14186 - protein, 108 aa, BradyrhizobiumColbertium
MTSDPEESVRLQGFGEMTLRTAVETLMLLAPRERSEAAIFRVRDGVRLAQSEIAELASSWGLTPAPHVRSPRLVPEHHWPDLVRGMVREAPLPSLMVAFLVGVLVARR

SEQ ID NO: 14187 - protein, 66 aa, BradyrhizobiumColbertium
MNGAASIGQLQSRLDDLNKRLGQLESQHPDSWKVEELKSSALSLSREIDDIRCAEATAALSELLRK

SEQ ID NO: 14188 - protein, 117 aa, BradyrhizobiumColbertium
MRLAHQRHQPRHHCGSGVASRDRPELAGCNGHKSRHASFPQFSECAGPLLPNGAPRAQAAGPRCREHNQIPCRRVSSCGAGTSCGAGTSLPICNGSPRSEAGQNKPPFRPRTAFTRP

SEQ ID NO: 14189 - protein, 288 aa, BradyrhizobiumColbertium
MRQAHTNGCDLIVYPELALTTFFPRWYFEDQAEIDSFFEREMPGSETQVLFDLARELGVGFCIGYAELTAEAGIVRRYNTSILVDKSGAIVLKYRKVHLPGHAEHEPWRKFQHLEKRYFEPGSRFGVVDAFGGVMGMAICNDRRWSETYRVMGLQGVEMVMIGYNTPVHNPPAPEHDDLSLFHNQLVMQAGAYQNGTFVVGVAKAGVEEGVDHIGGSCIIAPSGEIIARCTTKGDELALARCDLDLCNSYKRTTFNFDVHRQPQAYGMIVGRKGVTTMADGKPVPRKG

SEQ ID NO: 14190 - protein, 132 aa, BradyrhizobiumColbertium
MTFIAALRHDRISAPWVIDGPINGELFTLYVEKVLAPTLAPGEIVILDNLGSHKGKAARQAIRARGAHRIFLPPYSPDLNPIEQVFAKLKHLMRAAEPRDVEATWRKVGELLDLFSNEECTNYFKNSGYVSV

SEQ ID NO: 14191 - protein, 52 aa, BradyrhizobiumColbertium
MKDIRDIYQEIAEQRAELMYCILSAEERRETQARLDAALAEAERRLREEEGA

SEQ ID NO: 14192 - protein, 80 aa, BradyrhizobiumColbertium
MEVALLVAGLLAIVIVLYMFLSVPGKRASTKVKCLIFSVLVALMTALWCAVYGPDFWVMVQAAVIIVVAAAVGLLSSSNN

SEQ ID NO: 14193 - protein, 66 aa, BradyrhizobiumColbertium
MGEPPAADGSIRFAHGARTRSPPIPVTILSLKTIVPVDCPTSFAPEARLSLNPGLSRSKAERSIVR

SEQ ID NO: 14194 - protein, 187 aa, BradyrhizobiumColbertium
MTVALHPSIDNGIKQGSGSFAGGTLVCKCTDHPVKVGIKGDVAHNHACGCTKCWKPQGATFSVVAVVPRQNVTVLENGDKLQIVDPSAVIQRYACKACGTHMYGRIENKGHPFYGLDFIHPELFQEQGSQAPQFAAFVSSVIESGVKPEQMAGIRSRLKELGLEPYDCLSPALMDAIATHVAKAKAA

SEQ ID NO: 14195 - protein, 369 aa, BradyrhizobiumColbertium
MKTRAAVAFEAKKPLEIVEIDLEGPKAGEVLVEIKATGICHTDAYTLDGFDSEGIFPSILGHEGAGIIREIGPGVTSVKPGDHVIPLYTPECRQCKSCLSQKTNLCTAIRATQGKGVMPDGTSRFSYKGKPIYHYMGCSTFSNFTVLPEIAVAKIREDAPFDKSCYIGCGVTTGVGAVVNTAKVEPGANVVVFGLGGIGLNVIQGAKMAGADKIIGVDINDSKEEWGKRFGMTHFVNPKKVTGDIVQHLVGLTDGGADYTFDCTGNTTVMRQALEACHRGWGTSIIIGVAEAGKEISTRPFQLVTGRNWRGTAFGGARGRTDVPKIVDWYMNGKIQIDPMITHVLKLEEINKGFDLMHEGKSIRSVVVF

SEQ ID NO: 14196 - protein, 435 aa, BradyrhizobiumColbertium
MLVPGYSELLQAAPQLRIVGRLDAFAGLPYCEIGQFETIDGLTVYALVCPSLYERDGTPYCDPSGADWKDNDIRFGRLASAAAEIAIGGADPGWRPDLIHVNDWTSALAPAYLAWRGCSIPSILTIHNAAYAGVFDRERLGPLGVPESAFTVDGMEFYGRASFLKAGISYCSHVTTVSSTYADEITRPEFGCGLDGVLRLKAEDGRLTGIVNGIDRSWDPRRDPHLDRPFEIGDWGSRQANAKALRKAFGLAVSEGPLFAVISRLVHQKGVDLTIQATESIVRQGGQIVVAGRGDPGLESELAKLAVKYRGKVGVKIGYEDGLARRMYAGSDFLLMPSRFEPCGLTQMYAQRFGSLPIAHQTGGLADTIQDGVTGFLFQDASLAPMLNAIYRSFDVFSSARRLGAMRRAAMKRHFGWQRSAKKYTEVYEHAARSH

SEQ ID NO: 14197 - protein, 126 aa, BradyrhizobiumColbertium
MRDALAHAGKSGRRVVAAFIATAYTQDDTDAARTQWRRIADQLRPKVPKLAVFLDEAETDALGYMSFPAAHRAKLYSTNPLERLNGQVKRRTEAVGISPTKTPSPAWSAPSCSSRTTSGPFSAVAT

SEQ ID NO: 14198 - protein, 67 aa, BradyrhizobiumColbertium
MGAPVHGGSGSAGLTSRIRFNSRRRMTGLTVAGDTSTSAAICFLVWRCRRKASMAMHVAGGVWLGDE

SEQ ID NO: 14199 - protein, 162 aa, BradyrhizobiumColbertium
MQMKASGKRKQDTIQRFAWEINSISVHLQEIHYLWAKSLSISVPQWRMIAALYDLDRGAGVPVNAVSKMLHVDPSFVTTQSKLLEKRGFVQRKPSPEDRRIVRMSLTDMTRKHLATLALRQERLNEYISAEFGARKLDDLIDDLAALKRRLERACVKFAADL

SEQ ID NO: 14200 - protein, 472 aa, BradyrhizobiumColbertium
MHKQDHSGSPHGSISPFGFGDYFFFMGDRANNGYPGSDGMDVAFGRGGNDRLTGGPADDDLIGGIGNDRLSGGSGADHLDGGAGNDVLAGGDADDMLVGGTGNDYLNEGAGHGDLEGGPGNDILVGGPGADAFVVEPESGHDVIKDFRAGPGMFDHLALQDISPNELSFQDTPDGVLISWNRGTSSVLLEGVAKSELAQDDFMFADSKELLPVGVPESASVAASSNAFWWSSHGSQAATETFQFDDVNLKTGTSADDVFQATADRDFYFGGGGNDRLSGGAGADHLAGDAGNDALYGGNGENDLRGGDGNDQLFGGKDADMLMGGNGSDRLSAGAGHDMLDGGPGDDILDGGPGADAFVVTPTSGNDVIVGGFTPGPGAFDHIAFEDILPNQVSVNDTLQGVLVSWGSGSILLEGIQKDQLAQDDFMFDSVEGGAFVPDPSITSEGSALLFPENEQDLVHANPVSDNWTIIA

SEQ ID NO: 14201 - protein, 61 aa, BradyrhizobiumColbertium
MDSGAQPPSPRSPDGFYGDGEIEATSNILLAVVDDKQQLLRLAAAPWIVPALLCKLGRSDA

SEQ ID NO: 14202 - protein, 79 aa, BradyrhizobiumColbertium
MGTGSDVSHIRAVLKEIFENAAIRSNAEMLIDGSDIRSREAAIRFKMLIGTIDITDADLVAAFHELWVGREMNAPISSF

SEQ ID NO: 14203 - protein, 145 aa, BradyrhizobiumColbertium
MAAAAGSSLRLHIQRRLRPFFGPYPLLMMVTWADKIGLIKGNGEALALLERLRRAAIEGELEFYGQLVTTTGVERELTKVPPGHLQVCAIGLGTSRAQGRNEDAFTYDPKRPASKASRQVGHFRNLHVSRSVLGIIRRIWEDAHG

SEQ ID NO: 14204 - protein, 65 aa, BradyrhizobiumColbertium
MLLVSACQLRSRQRPRRPQTPTELDPEDHVLSPVGNEEWLRSYWNGIAGRLTRGMLAADASPGHR

SEQ ID NO: 14205 - protein, 46 aa, BradyrhizobiumColbertium
MQSQAGIPSASATHPSMKALRDDLTEIVRILLKDPERLVLPPRYGL

SEQ ID NO: 14206 - protein, 120 aa, BradyrhizobiumColbertium
MTAEQQRDLLEMTEDRHSRGSTVVTSQLPVEHWHELIGNPTIADAILDRLVHNAHRLTRASAYAKPPPNVRRLTTSPPTDLMTSSETVGIIAILGRLQSVQAADLARNPRPTRRNALAGA

SEQ ID NO: 14207 - protein, 141 aa, BradyrhizobiumColbertium
MAAVAPREGERLEQPKQQLIEHGAVVSADLAAQGASNSALAVAGRADDEQILMPVDPLVGDEFLEQRLVEPRGAFTSISWRRRSAGGWRTAIRATSRLFSRSVASWSTSSARRSSRTTLLRDQGLREHNRQQSDRCGFGLG

SEQ ID NO: 14208 - protein, 47 aa, BradyrhizobiumColbertium
MLAPDGEAPIEPTRLDCDKIDPLRSPELDRWTHSQSLKPATNENARD

SEQ ID NO: 14209 - protein, 43 aa, BradyrhizobiumColbertium
MVASFRHADGRTHGVGDFCDEQIIEAIESLNVTKFHRLYSLVE

SEQ ID NO: 14210 - protein, 141 aa, BradyrhizobiumColbertium
MIDGDTIEIHGQRVRLWGIDAPESNQLCRNDHSKLYQCGRVAATALAGLLWAIKRPVSCSPVDRDRYGRTVATCTVGTPGPDIGHWLVANGHALDWSKYSKGKYEDAQRGAEKASIGIWAGSFVEPWRYRACLRAGGRPSK

SEQ ID NO: 14211 - protein, 81 aa, BradyrhizobiumColbertium
MISIEQIRAARGLLGWSQTDLAEAAGRSLPTIKRLERESDDGSAVSEDVRDAVRAALEKAGVEFIPENGGGAGVRMKKRKR

SEQ ID NO: 14212 - protein, 105 aa, BradyrhizobiumColbertium
MSAPFLADQQVGQFIPTPTLGRREALANAKAHSAANALRSKLMIEAHARAKADYADELACRGRAHHVNRPYSYYLALQMRSGFAEARVARTGIAPAFELLPQHWA

SEQ ID NO: 14213 - protein, 203 aa, BradyrhizobiumColbertium
MLSPTANIDRVRVPARLLLKGDVTGSGEIVLGVSFGIATPRGKVEVSLSKGEHGRVGIWNAGTIIVVRRSTSNATAPEVADDTDEIPLSHRLPTFNELASFDAGKAWDQLSPDQQREIGVLALRFGTVGQCEGYFHDTIEGVRKGFNSAHWTPQVQATAVWPRLHVELIESAAQVAFQDLCEHFDPLWPQLFGWQARKEVKQP

SEQ ID NO: 14214 - protein, 46 aa, BradyrhizobiumColbertium
MVGAATGVADATDMETSEFTNDLLLICAPVSGMICPTDGSDRADPV

SEQ ID NO: 14215 - protein, 88 aa, BradyrhizobiumColbertium
MEICAAYDAWYNQPRKRGFAKAAKAKERASRAYHRAEAAVCSERATTLSGLQAKLRCIEINGQLDDLNTPITESLLLDLQQMGKTISA

SEQ ID NO: 14216 - protein, 51 aa, BradyrhizobiumColbertium
MTVWIYDQGEDLKVFASEEAAQSWIDENDSEGVAFEYKVIGPPVPLGGPAP

SEQ ID NO: 14217 - protein, 73 aa, BradyrhizobiumColbertium
MARLSPAEQIQQSYDLAMMALADYLTQERDATATVDALIRILDRDNLRDAITEVLVDARVHPRPGIDISEGQL

SEQ ID NO: 14218 - protein, 80 aa, BradyrhizobiumColbertium
MFATAPAPAQVDLRQPNGPVDLRVDGRANKREGLPPSAADKGNFVYGNPVYESDCAEVEQLSPNVRRRYQSRVRRACGLE

SEQ ID NO: 14219 - protein, 48 aa, BradyrhizobiumColbertium
MRRSLLICPAARFPIAAQFDHYGNLALNTEAKERNNRRFAARLSKGKR

SEQ ID NO: 14220 - protein, 95 aa, BradyrhizobiumColbertium
MLTVLACIPGDRLIDLRDKLPRTVRTIDLLVSVEPFYARLYVYQPGFPASAQSCCRNLPNSVLKLPVIDGRFCIRQSQPKMKWKMQVLGRPGESA

SEQ ID NO: 14221 - protein, 38 aa, BradyrhizobiumColbertium
MLIGLRDLKQSVLIEITKAIYGLDDYGGVGGRSGSNGQ

SEQ ID NO: 14222 - protein, 163 aa, BradyrhizobiumColbertium
MITITSNDALSTNANGQAKITAFNVAFDDLSFVPAGTVTGYSAVLFNIQAPKLDKNEAPTTVSFSFNNGAYGDLTLGNNVYDFVLKDGGSNFFLATVADGSVITQGSLITSRNIDAFEQVRVDIAAPVTAVPEPSTWAMMILGFAGVGFLAYRRRSQAAANPA

SEQ ID NO: 14223 - protein, 89 aa, BradyrhizobiumColbertium
MYHPPDHGLPLVQLKERRRELVVALRNHKGPIGDDELTQIAVLQQTISAFEDVIADLDCEQNEATNDNSDRLLRSFPAFGRRSVAHSPA

SEQ ID NO: 14224 - protein, 120 aa, BradyrhizobiumColbertium
MSELSQYAILFGLSVGVFGFVLSLYGLARAIGRTRSEPGKDVPATAGTLSRDPVWVRYHARYAGYALLFLAFDMEMAFMYPWAVVYREEGLIALLDMGVFLSILFLGLLYGWSQGALRRQ

SEQ ID NO: 14225 - protein, 261 aa, BradyrhizobiumColbertium
MGQHRSTQRKTPTTPDDEAALTADIIELARQYGRYGYRRITALLRRAGWMVNKKRVERIWRCEGLKVPLKQPKRGRLWFNDGSCIRLRPERPNHVWSYDFVADRTHDGKAFRMLCIIDEFSRESLAIRVARKLKATDVIEALCELFVSRGIPAHIRSDNGPEFVAEALRDWIATVGARTAYIEPGSPWENGYCESFNGKLRDELLNGEIFYTLKEAQIVIENWRRHYNTVRPHSSLGYRPPAPEAIVWPAPKEVVKMQSLN

SEQ ID NO: 14226 - protein, 92 aa, BradyrhizobiumColbertium
MARKRHTAEEIVAKLRQVDVLMAQGRQVADAVRAIGVTEVTYYRWRNEYGGLKGDQVKRLKELETENNRLRRAVSDLTLDKLILAEAAKGNF

SEQ ID NO: 14227 - protein, 713 aa, BradyrhizobiumColbertium
MAQVIKLGQKLTDDAIMMFIKLMGRLFSQVNNRKKQRHMNARIETSKALRLFLDTILALQAANDADEDAIEAVNREVGWHRLLQIKPSLEAMVENGDVSPLVMAAEQYGNIRKFAGAFLQAFTFRSRRRHDPLLAAVAVLKMLYVEGRRVLPDRVPVGHLGATEKKLIFEDGKPDRRLYEIATFAHLRDRLHSRDVWVEGSRSFRPIDEDLMPTPTFVALKGQDQLGLGVASDCAIWLAEVRQMMDFNLKRLAWRARFGKLDGVRMENGTLIVTPHTSDVPAAAEALNAEITDMYPLVEVPDLLREVHEWTGFADQFTHVRTGDAPQNIAAMLAGVLADGTNLGPKRMAGASKGISAHQIGWMRSFHARSETYRAAQACVTDAHTRHPHSQIWGDGTTASSDGQFFRASDRAARRSDINLHYGSEPGSKFYSGLSDQYGYYSILPISPTESEAVYVLDGLFDHDTILEIEELFTDTGGASDHVFALFCLIGRRFAPRLRNIKDRKFHTFEKADAYPTLANHIGAPINTALIMEHWDELLRLAASITTRTVAPSAILKRLSASSKSSDLAKALREFGRIERTLFMIEWYSSPALRRRCQAGLNKGEAAHKLKRAVFFHERGEIRDRSFDSQAFRASGLNLVVSAIVHWNTVYLSRATAHLRQRGRNIPDRLLKHVSPLSWEHINLTGIYSWDTEQQLSEGFRLLRLPGRMLRAA

SEQ ID NO: 14228 - protein, 101 aa, BradyrhizobiumColbertium
MEHQDLLSGLIRLHVLHHAAEGEVYGQWMIEELAHHGYKLSAGTLYPMLRSMEKKGYLVSEKQRAGRSVRHIYRATPLGREALEMARGKVRELIGEMIEHR

SEQ ID NO: 14229 - protein, 408 aa, BradyrhizobiumColbertium
MTAHDNSVRLAQPIAGSPFEVFRVFLKLGLTSFGGPIAHLGYFRDELVVRRKWIDEEGYADLVALCQFLPGPASSQVGFSLGVLRGNGLLGGLAAWLAFTIPSAAILFAFALGAAAFTGAIAEGVLHGLKLVAVAVVAQAIWGMAKNLTPDRERAAIALVGIAIVVFIGGSFGQIGAIALGAVAGLWLCRGELSKPTGHLRFPVSRRGGAVALIVFLALFVIPPLLVMTTGHQAVALFDAFYRSGALVFGGGHVVLPLLQAQVVAPGWVTNESFLTGYGLAQAVPGPLFTFAAYLGTVMGPTPDGLVGASIALVAIFLPGVLLVYGMLPYWDALRLRPTAQAAMRGANAAVVGILGAALYDPVWTSAVLSPPDFALALAGFLLLTVWKTQPWIVVVLLAAGGTLLHVI

SEQ ID NO: 14230 - protein, 639 aa, BradyrhizobiumColbertium
MRDTLKSFAEIGGALVDAQDDGQPLGDVIASGSGWDGFKTLVVMATRLTATMADDPLNHVLDGYHRFRRYAPRMLRLLDLRAAPVAQPLLEAVTALRTGSNDAAQTAFLRPSSKWHRHLRAQAAGDTRLWKIAVLFHLRDAFRSGDIWLARSRRYGDLKQALVPAQAVAEDGRLAVPLRPEEWLADRQARLDIRLRELGRAARSGTIPGGSIENGVLHIEKLEAAAPIGAEDLVLDLYKQIPPTRITDLLLEVDAASGFTEAFTHLRTGAPCADRIGLMNVILAEGVNLGLRKMADATNTHTFWELIRIGRWHVEGEAYDRALAIVVEAQAALPMARFWGMGTSASSDGQFFAATEHGEAMNLVNAKYGNTPGLKAYSHVSDQYAPFAIQVIPATASEAPYILDGLLMNDAGRHVREQFADTGGFTDHVFAACAILGYRFAPRIRDLPSKRLYAFNPSAAPAHLRAMIGGKINQAMIERNWPDILRIAATIAAGSIAPSQILRKLASYPRQNELATALREVGRVERTLFMIDWILDAELQRRAQIGLNKGEAHHALKRAISFHRRGEIRDRSAEGQHYRIAGMNLLAAIIIFWNTMKLGEVVANQKRDGKVLSPDLLAHVSPLGWEHINLTGEYRWPKA

SEQ ID NO: 14231 - protein, 535 aa, BradyrhizobiumColbertium
MAVQLRFLIRWMAGRGMHGFDELDTDTAKEFMRSVTERRGHAGMPLRPGTRQAYANLLIGLFQQRARLACPPSEHPFADERASRFSGFGRQTIQRLPHTPDDIAVALISAAIRLIGQPAADVIALRDRVVPFRKDDPGPTPFAHRQAVRALVSSFRFSTIEGEEVAWHPPLTRTRELRLLINRIQEACFVTISYLVGARVSEILSLQANCVEERPSADGAESFSYLRGRIFKTAGTDAGTPHLWPAPAPVLRAVEVLHHLSEPFRAETGRSELWLSLAGRGVVDRRPPEVPTGWSLIIRLNRRFAPFIDLPCQGDGTPWHLTTHQGRKTFARFVGKRDRTGLHALQHHFGHVTRIMTDSAYVGTDFDLSELVDAQTLEETRFALEELLTASRLAGNGGRRLSSRSRFRGRTRDGELAAYINFLIEDSGMRLGVCDWGYCVYRVETAACMGDNRGPNALWRTQSTCASCANFAVTERHRPVWQARLDRNLALIADRRLDDPSLALANTRIAECQRILSDLSAAGEGHAQEIHRKSG

SEQ ID NO: 14232 - protein, 153 aa, BradyrhizobiumColbertium
MPKRSTANPDDRRIKATAEKLRAALDRLTNGSSEQPAASIRRLTVAALAREAGVGRNAIYANHRDILDALIRARRRQSVPDRITTMGDTLVEQRGVIDNMQQQIRQIVTENAGLLQRAIEAERRAERAERRSAHLTKEIVVLRGPAVLRTSSE

SEQ ID NO: 14233 - protein, 48 aa, BradyrhizobiumColbertium
MLMVFKLILAALKIWRQLKGTNHLSKLIAGVRFNDRIEVIQKPANRVA

SEQ ID NO: 14234 - protein, 125 aa, BradyrhizobiumColbertium
MIHHVSVGTNDVQRAKRFYDAVLPIVGIMPMAEDQGGLGYGSGTFHFSVQVPIDGRPATVGNGTHIAFAVENRSMVDRFYATALKHGGSDDGAPGLRPNYDPNYYGAFVRDPDGHKIEAVTYSAK

SEQ ID NO: 14235 - protein, 55 aa, BradyrhizobiumColbertium
MDTFYREAGPERSPVVLLPHGYPCSSHEFRNLMPRLADKLRLIAPDYRKRHEAPT

SEQ ID NO: 14236 - protein, 421 aa, BradyrhizobiumColbertium
MNETTNILPFRQPSAVDDPLTEILRNGARELLARAVEIELQAFLETTAELKLPDGRARVVRHGFGPARKIATGIGAIEVARPKVRDRGASGADRIRFTSAILPLWARRTKSLDALLPILYLRGISTGDFQEALSALLGQDAPNLSPSVISGLKAQWQGEYERWQKRDLSTRRYVYVWADGVFLQARMEDHSECMLVLIGATPKGKKELIGFQVGVRESAQSWRELLIDIRRRGLQAAPELAVGDGALGFWKAMDEVFPGTRRQRCWQHKTVNVLNKVPSSVQSGMKKALQDISMAPHGAAAELALEAFAEKYGAKYARAVDCLIKNREDLLAFYDFPAEHWVHLRTTNPIESVFATVRHRTVRTKGSLSPQTARLMVFKLIDAASKTWRRLKGTNQLPKIIAGARFADGIEVIPPQQSHAA

SEQ ID NO: 14237 - protein, 80 aa, BradyrhizobiumColbertium
MIGIVVLYAIWILHLLLFRGDGFAEWIGLLVVVQNIFTSLFNSHLFDFHEGWMYVIGVGVAGGMVIRAQQAEAKVGEVGS

SEQ ID NO: 14238 - protein, 514 aa, BradyrhizobiumColbertium
MLVDAAEGPLPQTKFVVSKALKVGLKPIVVINKVDRPDARPTEVINEVFDLFAALDASEEQLDFPILYGSAKQGWMAESPEGPKDKGMEPLFDLILRHVAPPKVEEGPFRMIGTILEANPYLGRIITGRISSGVLKPNQQVKVLNADGKLVEQGRITKILAFRGLERTPLDEAEAGDIVAIAGLTKGTVADTFCDPTVEVPLPAQPIDPPTVSMSFIVNNSPLAGTEGDKVTSRMIRDRLLREAEGNVALRVVESADKDAMEVSGRGELQLAILIETMRREGFELSVSRPRVVFQKDEATGATMEPIEEVVIDVDEEHSGVVVQKMSERKAELIEMRPSGGNRQRLVFYAPPRGLIGYQGELLTDTRGTAIMNRLFHGYAPYKGEIQGRRNGVLISNDQGEAVAYAMFKLEDRGPMMIEPGWKVYRGMIVGEHTRDNDLEINVLKGKQLTNIRTTSKDEAVRLTPPIRMTLEKALAYIEDDELVEVTPKSIRLRKKHLDPNERKRAEKAKEAVA

SEQ ID NO: 14239 - protein, 418 aa, BradyrhizobiumColbertium
MSSLPSFVDIAVIGAGAAGLGAAHALKDSGLSAIVLEARDRLGGRAWTVQASPEVTFDVGCGWLHSADKNSFVTIAKQLNFEINTDLPPWGDRAFGDAFPESERKEFVRAIDEFYERIWEAAEQGEDAPAAGYLEPGNRWNPMIDAISTYVNGCELDQVSLLDMEAYEDTYFNWRVRAGYGTLIAAYGAPCPVALNCNVTLVDHSGKRIRLETSRGTLEAGAVIITVPTNLIADEAIRFSPALPVKLDAARGLPLGVDDKVTLALDGAEAFPIEGNLRGATMRTAMGTYHIRPFGQPCIDGFFGGRFARELEDAGDGAFAAQSIDEIAAFLGNDIRRKLRPLRESRWAHDPFARGSYSHALPGHAGDRAVLAAPVDGRLFFAGEATSPNFFSTAHGARDSGERAAKEVLAALGELRSQ

SEQ ID NO: 14240 - protein, 135 aa, BradyrhizobiumColbertium
MPSWPDDDVILFDGVCIFCSRWVRFVANRDIAKRFRFTPIQSDYGARLARTFGIDPHDPDTNAVVHGGEVLLKSDAALTVLSLLPGWDWVRALFAIPKPLRDAVYGLVARNRYRIFGRYEACFVPDSDLRARVIE

SEQ ID NO: 14241 - protein, 439 aa, BradyrhizobiumColbertium
MSGRTILVLGASGLIGRFVTDDLRSRGFRVVGVARRLSSAQRMSALDVELPILSLDTASLTRLLNEHAVSVVVNCLGVLQDGPGSNTSTVHRDFVAQLLKAVGNSGRLIRLVHISIPGSAEADRTAFATTKREAEHLIASSGIPHAILRPGFVVAPSAYGGSAMLRALAAFPIDLPAREMATPFQPVAIEDISATIAWLAARDIDNASLKAVSWDLMQAEPVSMSGVIKPFRVAFGTEGWPRIAMPTFILDLGAKLGDLANYLGWMPPMRSTAIAELRRGVTGDPSAWIAATGIAPKRLADAVGRHPATIQDKWFARLFLIKALIFASLVAFWLVSGFIALFVSYPAAAGILSAHNFPPALVDPITIGTSLMDMSIGILIAFRRTAAVGLVAGIVASFGYMVGAAILTPDLWIEPLGALVKTGPAIVLMFVALMMLDNR

SEQ ID NO: 14242 - protein, 109 aa, BradyrhizobiumColbertium
MVVIADAIFTLSAVILQPLTGGLLMMLSATSVTERWLLASLALYAFAGLFWIPVVFMQIEMRDLAGRAAAQRSALPERYFVLFRRWFAFGFPGFGATMLILWLMIAKPF

SEQ ID NO: 14243 - protein, 48 aa, BradyrhizobiumColbertium
MTPYFLLKFFHVLGAIVILGTGTGIAFFMRWHIARPTWRSSPAPPRWS

SEQ ID NO: 14244 - protein, 299 aa, BradyrhizobiumColbertium
MRLHNTIALLPLLALLTAAPLCAQATFGPSGEEDGPFRRQHWLVPSPDPGLAAKALLFRPPGAGPFRLAVIAHASTQNALRRAQMPPPEYRALAAYLVARGFAVLVPERPGHGATGGRYVEDQGGCDEADYARSGRATAEAISLAVDYLRTQDFIGKDAAIVIGHSAGGWGALALAKADPKVISAITVFAPGRGGHANDEPNRVCAPDTLLGAAAEFGTAARIPVTWLVASNDSYFAPPFSQKLADAFRARGGKADLRVLPAVGSEGHWMIETEAGVKAASSELARALNPPKPVATKKR

SEQ ID NO: 14245 - protein, 173 aa, BradyrhizobiumColbertium
MIASMSTTLIEVRPAKAADATAVASTHDEAWRSAYQGIIPGAELEKLINRRGPQWWDSAIRKGSRVSVLVFGDKIAGYANYGRNRARSLHFDGEIYELYLRPEFQGLGFGRRLFAAARRDLMQSGLKSMVVWALSDNDPATEFYRALGGRMVARSSERFGPRALDKVAFAWTN

SEQ ID NO: 14246 - protein, 178 aa, BradyrhizobiumColbertium
MRIDAVSIGKNVPHDVNVIIEVPVGGEPIKYEMDKEAGTLVVDRFLYTPMRYPGNYGFIPHTLSDDGDPCDVLIINTRAIIPGAVMSVRPVGVLFMEDEAGGDEKILAVPSSKLTQRYDKVKSYSDLPDITLQQIQHFFEHYKDLEKGKWVKILRWGGPEDAHKLILEGMDREKKKKG

SEQ ID NO: 14247 - protein, 294 aa, BradyrhizobiumColbertium
MTAKIIDGKIIAAELRARVADEVARVRREHNLIPGLAVVLVGNDPASEVYVRSKHTQTQAAGMASFEHKLPADVSQADLLALVEKLNRDPSVHGILVQLPLPKGLNTEAVINAIDPAKDVDGLHPNNAGRLAGGFEALSPCTPLGCIILTRSVHASLEGMNAIVIGRSNLVGRPLVQLLLNENATVTIAHSRSRDLPGLVRKADLVYAAVGRPEMVRGDWLKPGATVIDVGINRIPRDDGKTRLVGDVAYQEALGVAGAITPVPGGVGQMTVACLLVNTLRAACAIAGLPKPAV

SEQ ID NO: 14248 - protein, 91 aa, BradyrhizobiumColbertium
MTPRGGRDDIDGIEQLADGRSVLKVRVRAIADGGEANKAVLVLLAKSLGVPKASVKLLSGATSRLKQIAVDGDPVRLGEALRQLASAKSND

SEQ ID NO: 14249 - protein, 96 aa, BradyrhizobiumColbertium
MRAVLDIVIIVLDLYVWLLIASAILSWLIAFNVVNTRNQFVSAVAEFLYRITEPLLAPIRNFLPSLGGLDISPIILILIIMFIERVILYYVYPNVI

SEQ ID NO: 14250 - protein, 270 aa, BradyrhizobiumColbertium
MAYEHILYEVSDKIATITLNRPDRMNAWTPVMERDVRHAMEASNADDNVRVIVITGAGRAFCAGADMDALKGLDPDDVRRASSLPPFDMNRRPDWQTRYGYYPSIKKPVIAMLNGATAGIGLVHALYCDLRFAADNTVFTTAFARRGLIAEHGISWMLPRIVGHANALDLLLSARRVSSEEALRIGLVNRLCPPEKLREETYAYARDLADMVSPSAMAVIKRQLYEVPFQTLAEATIEANREMMVALGGSDFREGVASFMEKRPPRFTGK

SEQ ID NO: 14251 - protein, 252 aa, BradyrhizobiumColbertium
MVAFPRRAPSAAASESRLPVLIVLHQECSTPGRVGNALRALGHGLDIRRPRFGDVLPETLEQHAGAVIFGGPMSANDSDDYIRREIDWIEIPLREQRPFLGICLGAQMLAMQLGARVAPHADALSQIGYYPIRPTAAGHALCPHWPDQVYHWHREGFELPVGAELLAEGDDFPVQAFRAGHAFGVQFHPDVTYAMMCRWTTRGYDGFSAPGARQRHHHFADRAVYDAAERAWLDHFIDGWLARRPVLAQAAE

SEQ ID NO: 14252 - protein, 238 aa, BradyrhizobiumColbertium
MFAANGHRLALTARRADRLEALAGEIAAKGGKKPIVIACDLEERNAGETIASALAAEGVELDHLVNNAGFGVFGDAIEQDRAEQLGIVDVNVRALTDLSLRFADQLIRNKGGLLNVGSVAGFLPGPGMAVYYASKAYVISFTEALRAELAPHGVRVTVLCPGPVPTEFQARAGVGSQHDTALLKVSAADVAQEAYRGLMTNKRAVLPGLGIKIVPLALRFFPRGFILAATSRFQRRRR

SEQ ID NO: 14253 - protein, 162 aa, BradyrhizobiumColbertium
MLDGLRQFIADIVGPQDHARAFGDSDYRLAATALLIHVVSLDGRPTAAEQRKLHGLIENHFGLDRGTADRLIADATEVEGDAVDLYRFTSVIMRSLDEEGRKRIVQMMWELVYADGQVSEFEDNVVWRASDLLGISQRDRIELKHAVAERAGGQVKNGAVGG

SEQ ID NO: 14254 - protein, 327 aa, BradyrhizobiumColbertium
MFWSSGVDFNKDSFATLANEVTLDTMELPAGEKATMSLQLPNDFVIIFEPVTHAAHFIDVQGEPTRDRQQLAIMYNKVQAPTGTTTMRPGPLRLSLENQAGVRVLPSVFIAAEALHHLIGKRKPFLTAKRMLSNQTFRDVFKADNLSLDQRLQITSLTFLFTDLKGSTALYERVGDLAAFDLVRAHFHALLEIISSEKGAVVKTIGDAVMATFVRPEHAIVAGLRMRAAMDELNRKRGTTDLIVKIGIHEGPCLAVMLNERQDYFGQTVNIAARVQSLSTAQEIHITGPVLDAPAVAEVLEQREIKPIQKQAALRGIADKMVVYEIP

SEQ ID NO: 14255 - protein, 136 aa, BradyrhizobiumColbertium
MSDIQAQFSVLKQTADAKVADAIAHLIEDGEDHELNRVNVLDFSRQHGLDEERVISAFLHSARLGLFDLGWNVLCPGCGGVLGAHSTLKALKPDDYHCALCACGYKASVDDQVEVSFTVNPRVRRIAAHDPDTLPV

SEQ ID NO: 14256 - protein, 456 aa, BradyrhizobiumColbertium
MNIASMRRPIIPPAPPRAPDDMSFFARLAVVRQNMIATWGQRAYEEDVIPGRFFFRNSFILNQPDAIRHVLLSNYENYTRTPAGIRMLRPVLGDGLLIAEGHSWTFQRRTLAPAFTPRATANLVPHMTAVLDETIAKLDARTGEDIDLREVMQRMTLEIAGRTMFSFGMDRHGATLRNFIMEYAARLGRPYFLDMLLPVSWPSPMDFARARFRKRWTEFVAMLIAERRATGKKEGAPPRDLFDLMDEARDPETGKGFSDEQLVDEVATMILAGHETTATALFWALYLLALDPDTQEEVASETRGEHLDSMADIDRQKFTRAVIDETMRLYPPAFLVARAARDKDNAAGVEIGKGDIIMIAPWLLHRHEKLWDQPNAFIPKRFMSKEAPDRFAYLPFGAGPRVCIGAPFAQAESVLALARLIGAFRVELADTASPVMPLGVVTTQPDHSPMFRITRR

SEQ ID NO: 14257 - protein, 457 aa, BradyrhizobiumColbertium
MKLSRRTILQGVGSLPFAVASLRTGVLAQTAPAATPDAEVPPILFVHGNGDYDALWITTLWRMESNGIARERMMAINFSDPLARSDDKVEQANRSSTEDQRRELAAAITELKRRTSASRVALVGSSRGGYAIRNVVKNGGAGEVSHAVLCGTPNHGVFATDDQPNNEFNGRGTFLRSLNEGASEVTPGVAFLTLRSDGLDKYAQPDGRFIGKPGTPTNVTAEGPELNGATNLVLGALDHREVAFHPRAFREIYKFIAGREPTRIAIVPEASVKLSGLVSGTPGGVPTNRPLAGATVDIFRVDADTGERKGGAVHSSKTGADGRWGPAQVDPTWSLEFVLMSPGATTTHIYRSPFPRSSEVVHLRPARPLGAADKDAGAVVIMSRPRGYFGLPRDVVLFDGKEPADVKPGVPTDATATLRLPAGEIGRNIVAQFGEERVVARAWPAAENRIAIAEMTY

SEQ ID NO: 14258 - protein, 562 aa, BradyrhizobiumColbertium
MTEQTNRQKIAADGITAPLRYTVFRRIWLASLLSNLGLLIQGVGAAWAMTQMAASADQVALVQTALMLPIMLISMPAGAIADMYDRRIVSIISLSIALIGATALTILAWLELITPEALLAFCFVVGSGNALFGPAWQSSVSEQVPPEALASAVALNGISYNIARSFGPAVGGVIVAALGAVAAFACNAILYLPLLVVLLLWRRSTEPSRLPREKLNRAMVSGFRYITNSPPIKIVLLRTLVMGLIGGAVMALMPLVARDLLRGGAQMYGIMLGAFGMGAVIGALNIHELRKRMSGEAAIRACTISMAFAMAALALSTEPVLTAAALVLGGAVWMAAIALFNIGVQLSAPRWVAGRSLAAFQAAIAGGIAIGAWGWGHLTDYAGVEIALLTAAGLMLISPLLGIWLTMPRVGARNEDADMLADPEVKLSLTGRSGPLVVEIEYRVAQENARAFHNVMQDVQLSRQRNGAYGWSIARDIADPELWTERYHCPTWFDYLRQRNRSTQSERALHQQAIGFHIGPEPVRIRRMLERPFGSVRWKDDTPDRASAEVLPVVATAAGSST

SEQ ID NO: 14259 - protein, 46 aa, BradyrhizobiumColbertium
MIVIPGRGVRREPGIHFSKCIPLDGFRALASAFALRARADKSRDPD

SEQ ID NO: 14260 - protein, 70 aa, BradyrhizobiumColbertium
MSRFLFVVSLLMCASGASAQQPGHDACARDVTRFCRAVMNNGDGAVLACLKQHRTRLSKGCDKVLTDHGQ

SEQ ID NO: 14261 - protein, 97 aa, BradyrhizobiumColbertium
MTKSFISKIRDTSLALGFAAIVSIVSTSASFAFSAEAQQMCTGDAFRLCSAEIPNIPKITACMIKHRSDLSAGCRAVMDKTLAKGASRKVADAQDKQ

SEQ ID NO: 14262 - protein, 351 aa, BradyrhizobiumColbertium
MRNALGLMLASVVAAVVIAAGGWVYYSARADQGAPKTVAARAADPLPAQAKLAARDDVETTAAVAARPAAAAPAPAPAPAMPMQPKQACANPNALGVSRVVEIDTTGGPGFGFEHFKQFDFLTDKEVVLTFDDGPWPVNTPAVLKALADECTRGLFFSVGKHATYHPEILKQVLAQGHTVGTHTWSHVNLNSKKLTEQQVKDEVEKGFSAVKFALGTNPAPFFRFPQLQHNPAMVAYFGTRNVAMFSTEIDSFDFRKGATPEKIVETVMTRLDKLGKGIILMHDFQKNTGIAMPTLLARLKAGGYKVVQMKAKAQLQTLPEYDEALMKDMKVPTAGTNSRPIASVVQTISQ

SEQ ID NO: 14263 - protein, 131 aa, BradyrhizobiumColbertium
MRKIILVAAMLLASASAQAGGSRGLSLAAAGEQSSAPQTTTSSTASATTRVSEAAPATEASKYSDRPPAVSLSAPPAAAAPAATTAAPASVPVATTKPATKSAARAHKPKHKRSWTERRIISELHRHGIYW

SEQ ID NO: 14264 - protein, 41 aa, BradyrhizobiumColbertium
MGDNLAPSGVARLPGHLLSGAANAERISLHEGPFGWVIAIT

SEQ ID NO: 14265 - protein, 587 aa, BradyrhizobiumColbertium
MLRIVLFLVLIALAAAGAAWVADQPGDLVLTAGGFRISTTLPRFVFLLGLFAAAVVLVWSILTMIWRTPGRLRRRRQDKRQARGRHAITHGLLAVGQGDPALARRHTEAARRHAPNDPLALLLHAQSAQLEGNREEAQRVFRVMAEREDTRLLGLRGLFIEAQRADDAVGAVMIAEEAIKLSPSSTWASHAVLGFRCARGDWAGALAILDSNLSAGLIDKQTYRRQRGVLLTARALELETMDRDVARESAMEAVKLAPTLVPAAVLAAKFESEAHQVRRAMKRIEAAWLANPHPDLADAYAHVKLGDTAWHRLQRVETLAAKTPADRPGHIEGQLAIARAAIDASEFARAREALAPYLSDPTQRVALLMAELERTEHGDGGRARAWTLRAVRARLDPAWTADGYVSERWRPVSPVTGRLDAFQWQTPVASLPSDRGTTIESSAFEEAMLAAPPPKRVTAAPSEASVEPAASVAPVAAPAAQDNSPPQAQEVAKEPAKEEPATAPAEPADPAPAPAESSPPAPTPVFRTRADLGKPAAAPIQAVIPIVRAPDDPGIDDDAPTDEFTEQIGTPKAQAGGWRGFWSRWGA

SEQ ID NO: 14266 - protein, 420 aa, BradyrhizobiumColbertium
MADDKPEDAGLAPDTGRAKRTPPTIDLQATEVSTQPQQVAGEPEAQPTPEHAASEPAQSGQAKFEESEPVQAEPEPEHVDTEPKRDEAEAAVAPAAAPPPISPWVIAPFSGAAAAAVVIAVGWMLGWPAVQAPSAAPQVSSATIDALSARVAAVEVKAGKPGGDPAMAARIDALEKSASSLRSDIGNLRAQSEKTASALSEARTASPAAAPDLAALNDRIAQLEHASKTERAELAQQSERIAEVKAMDDKPLRHVVAASLLDVAVRHGDPYQSQLAAARSLAAKPDMLKPLEAFASSGIPTPAALSRELLNIVPKLSPPAEAPASNAGIVERLQAGASKLVRIERTDAVGNDRGAIVARVTAAALRNDFAEARRELKTLPEADRAPAQAWLDKADARDAALAASRKFADGAMSDLVKPLQ

SEQ ID NO: 14267 - protein, 248 aa, BradyrhizobiumColbertium
MSILVTRPHPDNEATAESLRSRGHAVLLAPVLKFEPVAFHDAREAPYGAVLVTSANAIRAVAPQLPELGLLQLPLFAVGEHTAAVAREAGFAEVIVADGDAASLRDKVMQSAREKVLKKKSTLLYLAGADLSRDLGGELGAEGFRVVTQTTYRMAPVKHLPREVCEGFATHGVEAVLHYSRRSARAFLDAAREEGVEISALAIPHCCLSETVASVLRDAGASQVLVAATPDESALFDTLERALRTRLA

SEQ ID NO: 14268 - protein, 357 aa, BradyrhizobiumColbertium
MLVLGIETTCDETAAAVIERAGDGSGKILSNIVRSQIEEHARFGGVVPEIAARAHVDLLDGIIDRAMREAGIGFAQLNGVAAAAGPGLIGGVIVGLTTAKAIAMVHDTPLVAVNHLEAHALTPRLTDRIEFPYCLFLASGGHTQIVAVAGVGQYVRLGTTVDDAIGEAFDKVAKMLGLPYPGGPQVERAAAGGDAARFAFPRPMQGRPDANFSLSGLKTAVRTEASRLAEITSQDISDLCASFQAAVLDSTADRLSVGLRIFREKFGAPRALVAAGGVAANQAIRGALHDVAQQAQTQLIIPPPALCTDNGAMIAWAGAERLALGLSDTMDAQPRARWLLDANATAPAGYGNTRAGY

SEQ ID NO: 14269 - protein, 326 aa, BradyrhizobiumColbertium
MTALQSVGVIGAGAWGTALATVAARAGRSVILWARNAEHATRMASMRDNPRLPGVPLAPDIVVTNDLALAARADMLLIATPAQHLRGAVNMLASHLAKPVPIVACAKGIEHGTHKFMTDVIAEAAPHAQPAILSGPSFADDVARGLPTAVTLAASEERLSSALVQALGSPTFRPYHSTDIRGVEIGGAAKNVLAIAVGIAVGRKLGASAQAALTTRGFAELARLGRALGARRETLSGLSGLGDLILTCSSPQSRNFALGLSLGRGEQPPAGKLAEGEFTAPVLIELAASQRVEMPVSEAVASILSGKSTIDAAISALMTRPFKSEE

SEQ ID NO: 14270 - protein, 137 aa, BradyrhizobiumColbertium
MAYWLVKSEPSVWSWDQQVAKGAKGEAWTGVRNYTARQNLVAMKKGDKAFFYHSNEGKEIVGIAEIIKEAYPDPTDKTGKFVCVDIKADKPLKTPVTMAAIKAEKKLADMALVKYSRLSVQPVTADEWKLVCKMGGM

SEQ ID NO: 14271 - protein, 388 aa, BradyrhizobiumColbertium
MMDQQNLGTMRPASADPAAVALAKALGQWPKPTGFRRPSPKKTFDTAPVTVEALAKELGLRLGDQNELTIRRIKRGKGYSFVRPNGAHIRDARTIRRLHSMAVPPAYREVRYSADPNSHLQAVGRDAAGRLQYRYHADWEKVREQRKAHRLAKLVGALPKIRRKVSAFLSGDEPTREFALSAVIELIARTAIRPGNESYARLNGTRGATTLLKSNVTLEDDCFVLTFKAKGGKAVRKECDAAKLVRAIGILQGVPGKRMFQYRDAYGIVRAVNTTQVNAFLREIAGIKISLKDFRTLMASAVVVESLSRITPATSQRGRKKQVLDGIRAAADQLSNTPAICRRSYVHDTIVTAFEDGILERFAATMKGQRSQARREQLLAQVVATAAV

SEQ ID NO: 14272 - protein, 648 aa, BradyrhizobiumColbertium
MSEKIYDVPAEWAKRAWVDQAKYKEMYARSISDPNGFWAEQAERIDWMKAPTKIENVSFAPGNISIKWFEDGVLNVAHNCIDRHLRTRGNQTAIIWEGDDPSQSRHITYQELHDEVCRMANILRTRNVGKGDRVTIYLPMIPEAAYAMLACARIGAIHSVVFAGFSPDSLAQRINDCQSKVIITADEGLRGGKKVPLKANVDAALAKADGVDWVVVVKRTGGKVDMNPTRDLWYHEAAAMVTTECPVEHMHAEDPLFILYTSGSTGQPKGVLHTSGGYLVFASMTHQYVFDYHDGDIYWCTADVGWVTGHSYILYGPLANGATTLMFEGVPNYPDNSRFWNVIDKHKVNIFYTAPTAIRALMQGGDEPVKKTSRASLRLLGSVGEPINPEAWEWYHRVVGDGRCPIVDTWWQTETGGILITPLPGATKLKPGSATQPFFGVVPEIVDADGKVLEGETTGNLCLARSWPGQMRTVYGDHARFEQTYFSTYKGKYFTGDGCRRDADGYYWITGRVDDVINVSGHRMGTAEVESALVAHEKVSEAAVVGFPHDIKGQGIYAYVTLMAGVQPTEDLRKELVTWVRKEIGPIASPDQIQFAPGLPKTRSGKIMRRILRKIAEDEPGSLGDTSTLADPTVVDDLVKNRQNRKSA

SEQ ID NO: 14273 - protein, 171 aa, BradyrhizobiumColbertium
MSMRIAVALAATIGVGVMMSTAAEARPELVGAHLPDYSPGTIVVRTSERRLYLILDNGHAVRYPVGVGKAGKQWAGTTKIDGKYRNPAWAPPAEVKRDKPNIPDVIPGGSPRNPMGVAAMTLAGGEYAIHGTNVPGSIGGFVSYGCIRMLNDDITDLYGRVSVGTTVVVTR

SEQ ID NO: 14274 - protein, 197 aa, BradyrhizobiumColbertium
MRSRARINARQSSFGGSPFGRRFSGLIPWMFVVGVVAAIVLTFRHGTGWLLPHAADDRAQDAEIILQQIGNPDLLRPVDVIRTIDGDTFLARIRQREGRDPVVRIRLRGIDAPELKASCQQELDKAEAAARALRDLLGQGDVTIANLGPDKYGRVLADVATRQTASVAAALLSGGFVRSYNGGHRDGWCARRWRFWQ

SEQ ID NO: 14275 - protein, 572 aa, BradyrhizobiumColbertium
MGSFRFRIGTKLGIVTGISVVLVGGMLTNQMLGNRSIAESNRLVTINYLNKGNAQAAQTAMARAQIAALEIGAAPSGGEVDRLLEILRARAGEAGTEIDAATERATRKVTQDAYRETRKFVDAYLASGIELAAAQKAIIGAAAGGARIAAESAKASILAERMRPAALEVSKRIDDLVGVANEFAARRKGEMLAELDRVANFALIVGMFVVLTLIGSAVFSVLSIARPIRRIGDVLLDLARGNKAVEIPYTGRGDEVGDNARAAQTFKENLIRIEQMEAEQKEQQTAAAAQRKEEMTRLAGAFEAAVGGIIASVSAASQQLEAAAGTLSETAEQTQQLSGMVAAASEEASTNVGAVASAAEEMSTSVVEIGRQVHDSSRIASDAVKQAERTDMRINELLKAAGRIGDVVKLITAIAEQTNLLALNATIEAARAGESGRGFAVVASEVKALAAQTARATEEISAQIAGMQSATEDSVGAIKEIGATIARISDISTTIAATIEQQGAATAEIARNVSEAAKGTVEVADKISHVSQGASATGAASGQVLASARSLSSESSLLKVEVEKFLNTVRAA

SEQ ID NO: 14276 - protein, 339 aa, BradyrhizobiumColbertium
MNIDGTSPDSCERIADLLRQQPSALDSLPLSPVGEFQTRTVTLETLTREVTECLAQNFRDRPAEDFPMLYFACGKARVGSTALSNLFGMTGMPSYYQPLKAILRNALVDRPLTPWIVPSAKDEPHIFSKETIGPYVLAESLFNPLQLLVEAGYPRHRLHLIMLDREPASSLASWLDKLISRAPADTLLRHYVVAALGASRVAIYAQRQGIPVTHYVYEVSKEALASIRVLFDRLGLSSSFTESAVTSWREPGDASASNARVIFPSEATIYKVPNLHTSDSAYRYQRRTTASLGEAQLAVLERCGVNDAYRASVAACVRDLGLSAATSARLFGDWFAAAA

SEQ ID NO: 14277 - protein, 323 aa, BradyrhizobiumColbertium
MISMLDIPRTAESALPGRAGGKQLHAASHLRRLEAESIHILRETAAEFRKPVMLYSVGKDSSVLLHLAMKAFHPGKPPFPLLHVDTTWKFREMIAFRDRRARELGLDLIIHTNNDGLSQGIDPFTHGSARYTDVMKTQALRQALDLHGFDAAIGGARRDEEKSRAKERVFSHRSAAHRWDPKNQRPELWGLYNTVLAPGESMRVFPLSNWTELDVWDYILLEDIPIVPLYLADSRPVVERDGALIMVDDARMPMRPGEEPQWRSVRFRTLGCYPLTGATSSTAATLPEIVREMMASRSSERQGRVIDRDSPASMERKKAEGYF

SEQ ID NO: 14278 - protein, 631 aa, BradyrhizobiumColbertium
MSYHEAPTIAVTDAPRLGQDDRPTLRFVTCGSVDDGKSTLVGRLLYDSKTLLEDQLDALASESKTAGTTGGDLDFALLVDGLQAEREQGITIDVAYRFFATRLRRFIVADTPGHAQYTRNMATGASNADLAVVLVDARRGVITQTRRHSHILSLLGIRRVVLAVNKMDLIGFDGDRFSAIAAEYLTLAGQLGISEVQCIPVVAPDGDNIVAASARMPWYTGPTVTAYLEAVDVAGDVSQRPFRLPVQWVNRPNAEFRGFCGRIASGTIAVGDAVRAQPSGHQTHVARILTPAGECNCAGAGESITLTLVDEIDVSRGDVLTGGSAAPVSDQLAAHLVWFDEEPMVAGRRYSLKCGTASTGAVITTLKHRIAIDTMAKEGATRLDVNEIGYVHIDLDRPLVFESYRDDRDIGSFILIDPISHRTAAAGMIDVSLRRATNIHWQQRAVDKSVRARLKQQRPCVLWFTGLSGAGKSTIADLVDRRLAELGRHAALLDGDNLRHGINRDLGFSNAERIENVRRVAEIAALFVDAGLIALVALISPFRSERELARQRLEAGEFIEIHVATPLAECERRDPKGLYRKARAGDLPAFTGIAQPYEAPPAPEITIDTSELSSEAACERIISYLREHNYL

SEQ ID NO: 14279 - protein, 67 aa, BradyrhizobiumColbertium
MSDQPPVPDRKPLSPAAQRALAEAEARRQAAAALAKDEARAKELQGPKGPEPTRYGDWERKGIASDF

SEQ ID NO: 14280 - protein, 40 aa, BradyrhizobiumColbertium
MPQDQALRMEERNVEMACGSKVLSERQFRRNGRMPGEPDL

SEQ ID NO: 14281 - protein, 437 aa, BradyrhizobiumColbertium
MPGLAARRIAADIVDGVLHKHRTLDDQLDGSGAHPGLKTLPDRDRALMRRLVATVLRRLGTLGHVLSRLLDKGIPSDAPRAQSALLIGAAQILWMDVPDHAAVDLSVRLVQSDRRAARYAGLVNAVLRRCAREGKALIDEVATQSQDLPPWLLARWSAHYGETTAREMALALGHEPSLDLTMKSDPAQWASRLHGETLPTGTVRMLLHGSVTMLPGFAEGQWWVQDAAASLPARLFGDVKGKSIADLCAAPGGKTAQLAHAGAHVTAVDRSPARVARLRENLARLSLQAETVVADAVEWAGPAEAFDGILIDAPCTSTGTIRRHPDVAWLRQESDIAALAALQQRLLRKSLSLLKPGGTLVYCTCSLEPEEGEQAVAALLAAEPALRRVPIEAAGVAGLDEILSRDGDLRTLPCHLPNADPKLGGLDGFFAARLVKS

SEQ ID NO: 14282 - protein, 595 aa, BradyrhizobiumColbertium
MLILSPSRQGVSVAQRRHISALVMNRFARNVLARASGGSVAVSRVWPGRTDRLIIAPHDLRTADATRAAEIYAGRFVFAGKIVNCHGRSIFDLEPPSEDWEVALLGFGWLRHLRAADTALTRANARALIEDWIANPANKRRPVARRADVLARRVISLLSQAPLVLSETDNKFYRRYLRALAREIRFLRYTMVDIPDGVPKLQVLIALCYASLCLANQTRHIRSASKKLSDELQRQILPDGGHISRNPGALIELLIDLLPLRQTFAARNIAPPPALLNAIDRMMPMLRFFRHGDGNFALFNGMSATSSDLLATLLAYDDTHGVPMANMPHTGFQRLDAGQTTVIIDTGPPPPAGVSHDAHAGCLSFELSSGTSRIVTNCGMPTTGRDNWRPFARSTAAHSTLTYHDTSSCQFVEMSAMKRLLHGAPVTSGPVEVESYREVVQNGTLLTTSHDGYLARFGAIHRRVLMIADDGARIDGEDTLSPPQGGRFKGADADFALRFHLHPAVKASRLSDARGVMLVLPNRDVWTFEALDDKVDLEDSVFLAGNDGPRRTAQIVIRQNARQAPSIRWSFVRSTASPAVTNARRNARREPELPL

SEQ ID NO: 14283 - protein, 530 aa, BradyrhizobiumColbertium
MTDHPRRVTRALLSVSDKTGLIEFAKALAAQGVELVSTGGTAKAIAAAGLKVKDVSDLTGFPEMMDGRVKTLHPKVHGGLLAIRDNKEHAEAMKAHGIAPIDLLVVNLYPFEATVEKGAGFEDCIENIDIGGPAMIRAAAKNHDDVAVVVEAQDYQSVLDELAANKGATTLKLRRRLAAKAYARTAAYDAAISNWFSRQLEIDAPDFRAFGGRLIQSLRYGENPHQTAAFYTTPDKRPGVSTARQVQGKELSYNNINDTDAAYECIGEFDAKRTAACVIVKHANPCGVAEGSNLVEAYRRALACDSTSAFGGIIAMNRPLDADTAREITKIFTEVIIAPDASEEAIAIIGGKKNLRLLLAGSLPDPRAPGLTAKTVAGGLLVQSRDNAVVDDMTFKVVTKRAPTEAEMRDLKFAFRVAKHVKSNTIIYAKDLATVGIGAGQMSRVDSARIAARKAQDAANKLKLAEPLTKGSVVASDAFFPFADGMLACIEAGATAVVQPGGSMRDDEVIKAADEHGIAMVFTGTRHFRH

SEQ ID NO: 14284 - protein, 462 aa, BradyrhizobiumColbertium
MTTTIVPDVRMAGAAPTYPPRAAVVSWIFFDWAAQPYFTLITTFVFAPYFATSVAPNPATGQSLWAFAMAAAGLSIALLSPVLGAIADASGRRKPWIAGFGAVLVVASCTLWIGRPGDHAIIPLLLTAVALASVGAEFATVFNNAMMPTLVPPERMGRLSGTGWATGYIGGIVSLIIVLGLFAANPETGRTLLGLSPLFGLDPVMRQGDRAAGPLTGLWFIIFVTPMFLFTPDYPAKRPLGEALREGLSELKQSIKRLPKQKSLAAFLLANMIYTDGLVSLFAFGGIYAAGTFGWHTIQIGTFGIMLAIAGAFGAWLGGKLDDRLGPKRVIAGSLLVLLLAVAAILLVDKESVLFVKVAPPQAGAPLFSSAAERAYLLLGCLIGAAGGPLQAASRTLLIHLAPKDRIAQYFGLFALTGKVTSFIGPLLIGTITAVTASQKAGMAVLVVFFVAGLGLLMRVRK

SEQ ID NO: 14285 - protein, 582 aa, BradyrhizobiumColbertium
MSSYSTRRTFFAFIATLAFGFAPAAAQDARQGYVPPARDMVRAVAAEHGMVVAQEKLSAQIGADILRRGGNAVDAAVATGFAMAVTYPRAGNIGGGGFMVIHSADRNEDITIDYRETAPAAATPQIFLGADGTPDAAKSRDSALGIGIPGTVAGLALALDKYGSGRFTLAQLLAPAIALARDGIIVNDDIADTLPSWHRRLARWPSSARIFSRPDGTPLGEGDRLVQADLAETLSAVAAQGPRGFYEGPVAEKLAKAVTDAGGIMTPADLKAYQPVIRAPVRGSYRGYDIVSMQLPSSGGVVLVETLNILEGYQLADLKQGSAASLHLLIEAMKRAYADRARYLGDPAFVNAPIETLIAKDYASKLRAGISSERATPSKELVSASAGPREGSNTTHFSVVDARGNAVSNTYTLNFSYGVGLVADGTGVLLNNELDDFTAAVGASNAYGLIGFEANLPGPGKRPLSSMSPTIVLKEGKPVLVTGSPGGSRIISTVLQVIVNVLDYKMDVAAAVAAPRLHHQWLPDEVRVERGFPSDVLGELKAMGHHIVEPMGQTSANSICVTAEGPLGAADPRTRGAEAAGQ

SEQ ID NO: 14286 - protein, 431 aa, BradyrhizobiumColbertium
MTTSDPNQRIERAEIEDTSLLAFYRDMNMPERRTFWACAAGWALDGMDFMIYPLVIGTIIALWKVDAASAGLAGTVTLLASAIGGWLGGYLSDHIGRVRTLQITIIWFSFFSLICAFVQSFDQLLIARALLGLGFGGEWAAGAVLMGEAIRPQYRGRAVGSVQSGWAVGWGLAVLSQAILFSLMPAETAWRWMFVIGALPALLVFYIRRSVTEPQISAETRARQAASGDRPALWEIFSGPILKTTILASLMATGCQGGYYAVTFWVPQFLTKERHLSIVGSTGYLATLIIGSFIGYLVGAWLADRIGRRNLFLIFSIGAMAVVLLYTQLPLTNEILWVLGFPLGFFASGYFSGIGAFLTELYPTRLRGSGQGFCYNFGRGIGALFPFLVGALSATTSLANAIAIFAVVAYAVFFIAAFALPETRGRVLYAD

SEQ ID NO: 14287 - protein, 221 aa, BradyrhizobiumColbertium
MLTVHHLNNSRSQRVLWLLEELGVPYEIVRYQRQPDMRAPKELRAIHPLGKSPVITDNGNTIAESGAIIEYIIATYGNGRLIPPPNTPERLRYTYWLHYAEGSAMQPLLLKLLFTLMPKRAPALLRPLVRKVCNQALTALVNPQLKQHMDYWEGELGKAEWFAGSEFTAADIQMSFPLEAAQARGGLEQGHPKAMAFLERIHARPAYKRALEKGGPYQVGR

SEQ ID NO: 14288 - protein, 195 aa, BradyrhizobiumColbertium
MIPMHGTYTAFAGQRRLASGTAGDVALAVKRATQPLDQPIIIFDDGTGRSIDFDLRGDDREVLARLAQLMPPAETAEAPSEPRGRGRPKLGVVAREVTLLPRHWEWLNARPGGASVALRKLVEEARRASGDKDRERQARDAAYRFMSAMAGDLPQFEEASRALFADDRRRFTGLIADWPADIRDHIVKLAYSDRA

SEQ ID NO: 14289 - protein, 449 aa, BradyrhizobiumColbertium
MSAPKPLWTTFVRFLAPLMLSNALQSLFGTVSNVYLGQMIGVDALAAVSAFFPVMFFLFAFVMGLSTGATVLIGQAFGAGEHGRIKIIAGTTLAVGLLLSIPIALIGGLCSRELMMVLATPPDILDQASAYAKVMLLTMPLGFVFLLMTAMIRGVGDVLTPLLALALSTAIGLILTPLLIRGTSGLPAAGIISPAWASAIANAATLIVLAIHLLRRKHALAPDAVMMRHLRLNGAVLRNILGIGLPSAIGMMAMAIAELVLLGLVNSFGSNATAAYGAVNQVMGYTQFTAMSISIAVSILGAQAIGGGDRARLDGIVRAGLAFNLVLTGGLVALIYLAPRAVLGIFITDGAVLDLAKGLLYIALWSSVPFGLATVFSGAMRAGGVAFTPMLLSIFAIVVIELPAAVILSRTIGIDGVWAAYPIVFCAMFVLQMGYYLLVWRKRAIRRLI

SEQ ID NO: 14290 - protein, 202 aa, BradyrhizobiumColbertium
MTRTAPQFLFDFGSPNAYLSHLAIPAIEQRIGVKFDYVPILLGGIFKSTNNKSPAETLAGIKNKREFHRVETERFIKRFHVQPYVWNPHFPVNTLNLMRTAIAAELEGVFEQYVEAAFHHMWREPKKMDDPEIAAKALASSGLDAQKLFARAQEPDVKGRLIKNTEEAVARGAFGSPTFFVGDEMFFGKEQLREVEEMVSGK

SEQ ID NO: 14291 - protein, 307 aa, BradyrhizobiumColbertium
MRILVVGAGAIGGYFGGRLLQAGRDVTFLVRPRRANELASAGLVIKSPNGDVTLKNPPTVQADALKDKFDVVLLSCKAFDLDDAIKSFAAAVGPNTAIIPMLNGMRHLDTLDARFGSERVLGGLCAIAATLNEKREVVQLQPMQSINYGERDGKMSDRVKAIDEAFKSGITGATASENIMQDMWEKWVFLSSLAASTSLMRASVGDILAAPGGRDFLLGMLDETSAVATASGYPPGGPFFERVKGNLTAEGSPMTASMFRDIKAGLPVEADHVIGDLIARADAAKVPVPKLRIAYTHLKAYERQRGS

SEQ ID NO: 14292 - protein, 197 aa, BradyrhizobiumColbertium
MRRQVLSHAMGAVALLALGAFSASGADNAAIKEKASACAGCHGANGISQTENIPSLAGQPDQFLQWQLVFFRAGARKNEQMQPIVEQMTNEDIRNFGAYFSQLTPPKGPEDKDPDLSKKGAQVAAGRRCASCHTDSYAGTKGVARLAGQRQEYLVKALHDYKAGQRIGNGVAAMVDVAYRMSDEEITAVSHYLAHLK

SEQ ID NO: 14293 - protein, 424 aa, BradyrhizobiumColbertium
MTSMFHRSVLALAAVAILAGTSAGNAQQQDKNRALKKYESGTKEFWTHPPDDWFLGDETEAQKGLAPPSGPPTGASDAELANIVKKIKLPSGFKIEVYASGVLAARQMAWGDKGTLFVGSFGLGNVYAIKDNNGKKEVKTVLKGLNMPTGLAFRDGALYVIAVDKLIRYDNAEANLDNLGQGKVVYDDMPSYAAHGWKYIAVDKEGWFFLPFGPPFNIGIPPTSVSQIRRVDPKTGNAEIWALGVRNSVGGDVDPRTGKLWFTENARDWISDDLPSDKLNMINRIGEHFGYPYCHQGNLPDDKFAMGHKCSEFTPPVLNLGAHVAPLGMKFYTGDQFPAEYKNNILIAEHGSWNRHKYQGARIVRVIVGPDGKNPKREIFASGWLEGDQGYLGRPNDIIIAKDGSILVADDWAGAIYRISYTKK

SEQ ID NO: 14294 - protein, 328 aa, BradyrhizobiumColbertium
MTILITGSAGHLGEAILRTLRERGSPARGIDLKPSPFTDAVGSIVDPAFMRRQMDGVTAVIHTATLHKPHVATHSKQDFVDTNVTGTLNLLEAAAAAGVRSFVFTSTTSAFGSQLRPEAGEAAVWGTEDLAPVPKNIYGTTKLMAETLCELFFRERRLPVVVLRTSRFFPEEDDDPLMRSAYALDNAQANELLYRRLDIADAVSAHLLAVERAPKIGFGRYIVSATSPFEQRHLAALARDAASVVRELHPECARLYAARGWRLFPAIDRVYVNDRARRELGWRPEFDFAHVLRSLRDDRDFRSALAREVGSKGYHDRLFDGGPYPVAP

SEQ ID NO: 14295 - protein, 139 aa, BradyrhizobiumColbertium
MTSRADKLGRMVSLVKLQLRLSEWQLAQLREQERSLQDEQEWLVGALNDGTPPTGSSSDSIARRLNRTSVGARSVRAQASQQLDQVRAESRRVKQLEEVAKAALADKLREAEKRSLEDMAGANLVLSHWTPAIAKGNKT

SEQ ID NO: 14296 - protein, 160 aa, BradyrhizobiumColbertium
MIVTATTDLVLDVLEAADPVAQRAATAKLDALRSSDADFTVAMEAEVGRARAAAADQSATKAAEVRSDAVNGAPVQVIKAPASGEVYRKFEAFILQTFVETMLPKQSEEIFGKGTAGGVWKSMLAEQLGNQLAKGKGFGIAKQLAAARPDGPRAAEKAGS

SEQ ID NO: 14297 - protein, 170 aa, BradyrhizobiumColbertium
MQLQEGAAAMTMEQTLADTEMTTTEGAANDALLPVLLPAAGGEMMVDAADAVRSDEVRGLLAAIRRLASIVEEETVALATGQKINFDDFSARKSRSMLEFVRLMRARMHLGGEVEITEEIQRLRERLERNRSILEMHYDAVREVAAIIVKAIKEAESDGTYTGRAAQDGQ

SEQ ID NO: 14298 - protein, 152 aa, BradyrhizobiumColbertium
MIRLVLAGLWVCILTVGTSYAVAYWKENGSLLPAKDEYLDGLQYQKTRVLSVPMVENGNVQGYIVARFVYTVEGRTMHQLTVPPEPFVVDEAFRRIYADDRLDFRKLARYDLSILTTAIKQRVNERMQAEIVQDVLVEDFNYVSKEEFQQKP

SEQ ID NO: 14299 - protein, 256 aa, BradyrhizobiumColbertium
MFIIVDDRESVASSYVGGLVREGVSSIGFSSGEFWDWLQSASEADLAAVDAFLLGDCDARGSLPRAMRKRSSAPIIAVSGQKMLKNTLELFESGVDDVVHVPIHLREILARTAAIARRRVGELPRPCESRIQVFFNGRDPEIAGHALTLPRRELRILEYMVANHGKWITKTQIFNAVYGIFESTFDESVIESHVSKLRKKLRDRLGFDAIVARRYVGYRLNIPAGETLDEQVQELDDVGILLNRAHAVPAAYPAGN

SEQ ID NO: 14300 - protein, 313 aa, BradyrhizobiumColbertium
MSSDGQARPNATAEASAATKPVAEAGDNSTRATKPAADARRVSAVASDEVLAKEALEGLKRIRAKARLDKMAIPKPAAAVIKPAVIVAKPPPASPPWVAPLATLAVAAMLVVCACTGVIAYLTTQPAQNNVTANAEIRHLRETVAQLRRQVSGMSENLDGLRTAVDQSSKATNDRFGRFAENLDRIERVSSSSTAKLDKIAQVQAQTPAPAIVQAQPAPQQGPMMASVAAPEFTGSVPAAERASAPRKTIKGWSVRQAYEGIAILQGPNGVVEAVLGQQVPGLGRIEEIRSENGRLVVESSGGVVYSSRKATP

SEQ ID NO: 14301 - protein, 192 aa, BradyrhizobiumColbertium
MNLARESIELLEQAARILWFEGTKHGLRDREWMALRFLSRANRFSRTPSALASYVGTTRGTASFIIGELERLGYLERKRSATDKRSVTLSVTQQGKKFLVRDPVNVLVEAIAVLDDDVKIRFRDTFRHVLDQSDAAEQRHHTDVCKRCIFLREDRITTDNKTTVEFSCRLFRAPIAEAEVDLLCTSFEHHRQ

SEQ ID NO: 14302 - protein, 295 aa, BradyrhizobiumColbertium
MSFETTMTSDVVGLTKSAPVSRRGFMSASAAVAAGYTLAAGPVRAQVITTDANGLQTGDAKIKVGSEEMPAYFARPAGNTKAPVIIVAMEIFGLHEYIRDVTRRLAKLGAFAVAPDYYFRKGVDLTKVSEIKDLLPVVNAKPDAELLSDLDATVAWAQSQGGDAARLGIIGFCRGGRTVWEYAAHSGTLKAGVAFYGTLIDPANPLWPKSPMQLAPEMKAPVLGLYGGADSGIPVAQVEQMKAALEQNKKAAEFRIYPEAPHGFHADYRGSYRKDAAEDAWKQAQAWFRKYGVLS

SEQ ID NO: 14303 - protein, 71 aa, BradyrhizobiumColbertium
MRSGARVKDDSPVASTSIVMIAAAAARHAQCSARAPLLKSAPTAIGTPGKCEGGRSGHPLPSNISSRLHTS

SEQ ID NO: 14304 - protein, 282 aa, BradyrhizobiumColbertium
MRLFILGLGYSARHFVRQHGGSFSHVAGTVRDPAQRDDLGGLEVHAFSDGASTPATVQQVREADVLLVSIPPGSSGDPAIAAFGDVLQAGRRRVVYLSTIGVYGDHGGGWVDESTPPQATLERTQMRIAAEQAWTDTTHGDAAILRLAGIYGPGRNALATLRAGTARRIIKPGQVFNRIHVDDIASAIMAAVHHQGGGIWNICDDEPAPPQDVITYAAKLMGVTPPPEEAFATAEMSAMARSFYASSARVSNAKLKHELGVALAHPTYRQGLDALWRAGEGR

SEQ ID NO: 14305 - protein, 269 aa, BradyrhizobiumColbertium
MATGAMMQAPPAAARCHADELIRRAAALIFDVDGTLAETEELHRQAFNLAFARQGLDWHWDRAVYKDLLRVTGGKERMRAYHASLRTAAPLVDEDVAELHRIKTAHFAELVNTGCCPLRPGVAGLLAAARARGQRLAIATTTSHGNIDALLSQALGTRWAAEFDAVVAGDDVRHKKPAPDVYLEVLARLKLDAPDCVAVEDSSNGLIAASRAGVPVLITRSMFFGEDDFTAARVVLDDLSELGAATQKPKNNPMHSRSRRRDRCAQWMR

SEQ ID NO: 14306 - protein, 135 aa, BradyrhizobiumColbertium
MAKDSKVIAANAAFYAAFSTGDFDEMKRMWADDDAISCIHPGWPAIIGRATVIGSWRDILQNPERPQIVCAEPQAIVDGDSARVLCIEIVDGTALAAANHFRRVGDDWRLVHHQSSPIAQIVEQAEDDGASHRIH

SEQ ID NO: 14307 - protein, 72 aa, BradyrhizobiumColbertium
MRGEVTIPQFRDRLETYRDITAAILRQHHLDELLAPVAPVAEQFGLSLPLGAKPRLRLSAGGGDARLGWIAS

SEQ ID NO: 14308 - protein, 312 aa, BradyrhizobiumColbertium
MPELRRMLPSSNALFVFDAAARNGSFTAAAAELNVTQPAVSRMLGQFEEHLGVRLFDRTAGRAVLTEEGELLYRRVLEGFRSIETGLVEIERRRKGTETVTLSVSSAFTTHWLMPRIDKLQKRFPEVDLRFQLISGALRGPVENVDLGMRFRDRDEPSSGATLVMKEVMLPMCSPGYLGESDPTEGNTIIRLAETPGDWSADYASLLTGRRGAAKALSFTDYAVVVQAALLGQGIALGWLTVASHWLLTGALVPASGTLTTTRRICEFLPPRNRPMRPIAAEIRDWIIAQMKSEIVAIDRLYPKLGAMAACY

SEQ ID NO: 14309 - protein, 359 aa, BradyrhizobiumColbertium
MDKRAESVEIRSASKTYGAVRALDDVSLNVGAGEFVSLLGPSGSGKTTLLGILGGFILPSSGSIFFGGRDVTYMPPHKRDIGVVFQNYALFPHMSVGENVAFPLRARRLPKASWPDKVRAALGMVGLAGYEERGIAQLSGGQRQRVALARAVIFEPRLILMDEPLSALDKQLRESMQIELRALHRRIGATIIYVTHDQREALTMSDRVAVMKDGRLIQIDEPERLHDHPADSFVASFIGEATMLPVRRVDAACVALGNALLRSARAIPDGDALMLAVHGEKLLIDDGAQDAACNRLTGTVTDIVYQGESLRIFLALADGIALSLRQPSYHQAYSRIPPLGGSLTVTLHPEDTIVVPRAD

SEQ ID NO: 14310 - protein, 238 aa, BradyrhizobiumColbertium
MSTQAAFSNFKVLTFDVVGTLIDFETGVLDAVRKISGKTSAELSDDQIFEPYKRGRDKHYGRSSEAMFHVYRHLAKELGLPADDASCDVFQLSVLHWGPFADSVEALKRLRTKFRLVAMTNADRVALSCYAHALGDPFDDTVCADDTGVAKPNPEFFAYNRGRQSAFGYKQSDILHVAQSQYHDIGIARKLGYRVCWIERRQGIAGFGGTPAVETLTKPDFHYPTLKALADAAVGPAA

SEQ ID NO: 14311 - protein, 435 aa, BradyrhizobiumColbertium
MTRDWSELPSVNSLWEATAEPARAFPVLSGEQQADVVIIGAGYTGLSAAHHIAKDGLSPIVLEANRPGWGASGRNGGVITAKFRLSFREVDAAHGRAMAKRMYEIAHESTDMVEELVSEFGITSANLTRTGQVKAAHNETTLKTAISEADWMTREMGSAEVRILDKHGVRDETGSDMFVGGVLNPGSGGIHPLNYLRGLANGVASRGVPIFQESPVVRLRKESGGIVAETPQGAVRAKQAIIATNSYSDLTGATAQMQRTLIPFRSAIIATEQLPRNLAGRLMPTGRTYTETKRMMRWFRMVDNRVIFGGRGAFGKQDSQAAFDALRKAMVGIFGDLADVPLEYKWSGLVAMTMDSVPHIGRLDDRTLVSMGYNGAGVAMSSLMGRYLAAFVRGETPEVGLLDVRRMKPIPLYPLREPAVRMVAGWYQFLDAIGQ

SEQ ID NO: 14312 - protein, 352 aa, BradyrhizobiumColbertium
MTTKRNSGFGYALLGASISAVALGTAADAAEQITFVSQGGAYQQAQTVAILDPSAKKLGITINQDSIPDAWPAIKTQVGSGKPIWDVVDTPTGYCLRGGEQGLIEKLDFSKIPNAAAMPEAYRSPYSVSYEFYSSVLAYSQKTFPKDAPNSWVDFWDVKKFPGRRALRNHPIATLEAALMADGVAPDKLYPLDVDRAFKKLEEIKPHITVWWTSGAQSAQLLNDGEVDMEMAWNGRVSAVAKEGAKVSFTYNQGILQSTSLCILKGAPNLGTAVKFINEAVDPVHQANLPLHIDYGPGNPKAFETGVIKPERATQLPSEPANAAKQALMSYAWWSSPAGEAAEKRWASFMQK

SEQ ID NO: 14313 - protein, 285 aa, BradyrhizobiumColbertium
MSDPSQKHQRREHGLMLALVSPALLVVLALIVLPVGWLAWQSIYHDGFTLENYRRVFTEDIYWRSFALTFQISLAVTLIALLLGYPLAYLANSLPKGWGIFILSLVMLPFWTSVLVRAYAWLVLLQRSGVINQFLRHLELVSEPLALVHNTFGTVVATVHILLPFMVLPLYATMQKIPNDLMQAGASLGASPSLTFLRVFLPLSLPGVLAGCTMVFVLCLGFYITPELLGGGRTVMVSMLVSRNVELYNQFGAASAVAVVLLLSVLVIFFAVSRFISLDRVLGHK

SEQ ID NO: 14314 - protein, 249 aa, BradyrhizobiumColbertium
MISVLVLVYLIVPVLIIVPISFSSARFLTFPPPSFSLRWYEQYFSSPAWMQATRVTLTVAFLTVLIATPCGVAAAYAVSQSRLRIMRVIHMALLLPLVVPIIITAVGIFFVYTRVGLVATLPGLVLANVMLGLPYVVISVLAGLQSFDPAQEMVARSLGMNRLRSFFAVTLPQIKSSVVAGGIFAFISAMDETIVALFISGGQYQPLTKRMFTALRDEIDPTIAAISTLMTAASFMLVLLASARQKRSG

SEQ ID NO: 14315 - protein, 229 aa, BradyrhizobiumColbertium
MQTIGLIGGMSWESTALYYKLINERVRDRMGKLHSAPLLMYSYDFEEIKQMQYGGRWQEAAASLAEVARRLEDAGARAIVLCTNTMHKLAPEIISSVTVPFIHIGDATAQRIRARGYRRVGLLGTKFTMEEDFYIDRLRAHDLDVLIPPADERAEVNRVIYDELCLGNVTAPARRRYQEVMAALVGAGAECIILGCTEITMLVGPDDTSVETFDTTAIHAETAADFAIG

SEQ ID NO: 14316 - protein, 553 aa, BradyrhizobiumColbertium
MTIRNARTGGQILIDQLVAQGVERVTCVPGESYLAALDALHDSPIDVVICRAEGGAAMMAEAYGKLTGRPGVCFVTRGPGATNASHGVHIAMQDSTPMILFVGQVDTGMREREAFQELNYKAVFGTMAKWAVEIDRPDRIPELVARAFRVAMQGRPGPVVIALPENMLTETAAVADAMRVEPAMSWPAPADIEKLSTMLAGAKAPLVVLGGSRWTDEATKGIARFAERFDLPVATSFRRASLIDADHSHYAGDLGIGPSPGLKARIEGADVILLIGGRMSEMPSSSYTLLDIPTPRQKLIHVHPGSEELGRVYQPALAIQATPAAFAAAVETLKPSGAVAWKGEAAKAHADYLAWTEKARELPGTFQYGQVMTWLRDRLPKDAIVCNGAGNYAGWIHRHHRFHSFAAQLAPTSGSMGYGVPAGVLAKRQYPDRVVVAFAGDGCFLMNGQEFATAVQYDAPLIVVIIDNSQYGTIRMHQERDYPGRVVGTQLKNPDFAMYAKAFGGHGERVERTEEFAPAFERALASGKPSILHCIIDPRAISVGKDFTPAVKA

SEQ ID NO: 14317 - protein, 421 aa, BradyrhizobiumColbertium
MPAGRHVAIIGAGAIGVISAIEALREGHRVTLIDPGEPGGEQAASYGNAGWLSSHSVIPPAEPGIWKKVPGYLMDPLGPLAIRWSYLPKALPWLVKYLLSGWTESRVEKTAFALRDLLKDAPLLHRKLAEEAGVPELIERNGVMHVFTSRGNFDNDLGWRLRKKVGVEWLELSADEMRQREPDLHPRYTFGVVVEEAGRCRDPGAYVAALANHALASGAVHVRDKATGLRLSGNKLVAVVTENGEIPCDAAVVAAGARSKQLTASIGDPLPLETERGYHVMIENPESGPRSSMMASDAKMVVNWTNKGLRAAGTVEIAGLEAAPNWKRAEILRNHLLGMFPKLPKDIPASRIKTWFGHRPSMPDGRPCIGYARASRDVVYAFGHGHVGLVGSARTGRLVAQLVSGKAPEIPLGPFAPERFL

SEQ ID NO: 14318 - protein, 247 aa, BradyrhizobiumColbertium
MSTAANPSSRIARGGKSIYGAPLGILMLEARFPRIPGDMGNGTTWPFPVLYRVVSGASPEKVVLKGAAGLLPDFIDAAKDLVRLGAEAITTNCGFLSLFQKEIAAAVGVPVATSSLMQVPWVQATLPPGKRVGLVTVSGSTLSPAHLEGAGVPLDTPLVGTEKGKEFFRVLIKAEKDDMDVAQAERDVVEAGKELVARNPDVGAIVLECTNMPPYAAALQAEVGLPVYDIYSMIIWFHAGLRPRIFA

SEQ ID NO: 14319 - protein, 259 aa, BradyrhizobiumColbertium
MKLSGKVAAITGAARGIGKACAMRFLEDGVKVVISDIDAEGLAATATELGRPDALRTVVGNVAKRADVDQLVATAVKEFGRLDIMVNNAGVARNQGILDITEQDFDEIIGINLKGAFFGVQAAARQMIAQGGGGVIINMSSVNALLAIPALATYAMSKGGMKQLTSVAAVALAPHNIRVVAVGPGTILTDMVASSIYTSEEARKTVMSRTPAGRGGEPSEVASVVAFLASDDASYITGQTIYPDGGRLILNYTVPVKDK

SEQ ID NO: 14320 - protein, 264 aa, BradyrhizobiumColbertium
MKRESRGIQSIEVGGELLRALARSGEPMMLRDLAREAGMTPAKAHPYLASFSRIGLIEQDETTGRYEIGALALELGLISLRRLSGVRIARPKIAGLASQIGHAVSLAVWGTHGPTVVQLEEPAQPVHIVMRVGSVMALLETATGRAFAAFLPEKTISAALESGLDRHGVGYNPKRAVKGAKLTEMLAEVRKHGLARALGDPLPGVNAFSAPVFDHSGHVALVITAMGPEGTFDARWDSPIALALRDCAGGISKRLGHGMTVAAE

SEQ ID NO: 14321 - protein, 577 aa, BradyrhizobiumColbertium
MTGNEHSGAETYECDVLVAGSGCSGMSAAITARHRGLGVLIVEKEPRFGGTTARSGGWLWIPGTSLAKAYGIEETPEQARTYLRHEAGNNYDAARVDAFLSAGPEAVDFFTTKTALRFDMPLVFPDYHAEAPGGAQGGRSMVTRPFDGRELGDLVKTLGMPLPELTVFGMMLGSGKEIIHFMRVTKSLTSAAYVAKRLSRHLMDVLRYGRGMTLTNGNALAGRLAKSALDLKIPMWLSAPVHELTVENGAVTGAIVSREGRDVRVRARQGVVLACGGFPHDVERRKKMFPHAPTGNEHYSPGPTGNTGDGLRLAERAGGRIEDRLPNAAAWVPVSLTTRKDGSKGVMPHFIDRAKPGVIAVMRDGRRFANEGNSYHDFVQAMIKAAKPGEEIAAYLVCDHKTLRKYGLGCVPPFPMPLGHHLKTGYLMRGDTLEALAAKAGIDAKAFTETVRQFNAAAPLGHDAAFGKGSKAYNRYQGDALHGPNPCVAPIENGPFYAIKMVIGDLGTYAGIVTDENARALDAEGRVIPGLYAAGNDMASIMGGNYPGAGITLGPALTFGYIAGRHLADSAAKRNAA

SEQ ID NO: 14322 - protein, 44 aa, BradyrhizobiumColbertium
MYLAKVKKPEQSKEPWDYLEIVKTVKGEDAFRPVSESKCPLLKK

SEQ ID NO: 14323 - protein, 343 aa, BradyrhizobiumColbertium
MNAWYAAAWDAEVKAALLPRTICGKHVVMYRKAGGSVAALEDACWHRLVPLSKGRLEGDTVVCGYHGLKFNAQGRCTFMPSQETINPSACVRAYPVVERHRYIWLWMGDPALADPALVPDMHWNHDPAWAGDGKTIHVKCDYRLVLDNLMDLTHETFVHGSSIGNDAVAEAPFDVTHGEKTVTVTRWMRNIEPPPFWAKQLGKPGLVDRWQIIRFEAPCTIAIDVGVAPAGSGAPEGDRSHGVNGFVLNTITPETEKTCHYFWAFVRNYRIGEQRITTEIREGVSGIFREDELILEAQQRAMDENPDRIFYNLNVDAGAMWARKLIDRMVAKESAPKHLQAAE

SEQ ID NO: 14324 - protein, 250 aa, BradyrhizobiumColbertium
MAEREVDRSVSQTVKAQLALRDQILSGALRPGERISELQAVETTGASRTPVRMALVRLEEEGLLEAIPSGGFMVKAFSERDISDSIELRGTLEGLAARFAAERGVSARELEPLKECLAAIDELLRQVPISVDAFSAYVTLNARFHALLTELSRSPPLIRQIDRASALPFASPSGFVMAQSALPEAQQILIIGQEHHRVVIDAIENREGARAEAIMREHARLAVRNLRLALRNRTHLDLLPALALIKTATD

SEQ ID NO: 14325 - protein, 326 aa, BradyrhizobiumColbertium
MRFIESWIPATLVSTRDLAPGIREFLIRPDRFDGAAYPVGSHINVSVTIDGLPETRSYSLVGEASPAGFKVAVRRAEDSRGGSRYMWSLQPGARLDITQPASLLAVDWARPNYCLIAGGIGITPILGAAQALARRGAELTLHYAVRSRGEAAYLGDLAGMLGDRLVVHAGDEGKRLDLDALFASVPQGTLALFCGPMRMLDAARHAWIGAGHPLPDLRYETFGSSGTLPTEAFRVRLKDSDVELQIPRERSMLDVLNASGHDVMFDCRRGECGLCAIDVVAVDGEIDHRDVFFSDHQKQSNQKICACVSRARGTIVVDTLLRADAI

SEQ ID NO: 14326 - protein, 659 aa, BradyrhizobiumColbertium
MLPGLGMRTQTTNYVARLFAGDLSAFGGPATDEAMAGHLRAEQMSLVLGYSVGIMLANACNAIVLAIALWPSPDRIAALIWAGAVAGAAIAFGLHSRAVRRITKPQFVSRRAMHRLVRNAFILGAAWGIVPVAFFADASTGGQLVITCLCSGMLAGGALAFATIPIAAIAFTAPIFLGIAICLGRNGDLAFLLIAFLVVAYGSVLLRGVFVNSFSFARRVTRQVEAERTVRQDPLTHLPNRVAFNETLDAALKRLALSGEEFAVLLLDLDRFKEVNDQFGHPAGDEFLVQVAGRLQRCTRAAEHVARIGGDEFALVMANLTRPEDALEIAERLVAAFDEPLRIDGRQIVGATSVGIVLAPRDGDTPLDLMKNADAALYRAKKAGPGTICFFEEVDDRASRDRKALQSDLAGAIARNELFLVFQPFLDLDDHRITGFEALLRWQHPSRGLVPPNEFIPIAEETGLIHEIGEWVIRRACATVALWPEEIRVAVNFSAAQFHNTAILQTIVRAIADARIAPHRLEIEITESMLLSKYGSAASVLNALLELGITVALDDFGTGFSSLTYLRKLPFSRIKIDQSFIRDMLAQPDCAAIVKSVVSLARDLDIGVVAEGVETADQLEYLRQIGCDEVQGYLISRPVAADGVMALLETKRVRMTYAA

SEQ ID NO: 14327 - protein, 336 aa, BradyrhizobiumColbertium
MDRPGWRAPRRHWMRSNPEGLSMSEPSADVSATVEYTMDKWRMDRVPWAMWACVAGLAIALHAESRGQNGAALAAIYLALLGLAFAGYALTTLIGRSGLPLLLELLIGALVLVVISGVIGVISLMAGGSSGSSSYVGAMRSLYWSHLVNPSLNVFGWMLLYVGWGWIAFSSYRHFYADRAVVSLSSAGIRFHRPWLKGLFIPWHDVRGVGYLEIPSVSGPPFANPHSAAVTVGLDFYQRHVAPKRSFFAPPGAEAMFWPKGEMMQVVLNSADMTVKPENFLVPAEARWKAFRDQPGPSPQHGGTIVYGRWSIDGSRWQAIQFLAPVVAVAVVMLYR

SEQ ID NO: 14328 - protein, 121 aa, BradyrhizobiumColbertium
MPSRDIVEAFAKRLEAGDFIGAIEQFCTLDAVTFENNAAPTVGRDKLVAKERGVLAASKEVRAVRIGPSLIEGDHVATRWCFSFTNTEGVTRTLEEIAWQTWRGDQIIEERFFYDPKQLGR

SEQ ID NO: 14329 - protein, 196 aa, BradyrhizobiumColbertium
MAKQAERRAATIEAILAAARRLFGTQGFAATTMDEIAGAAGIAKGAVYHHFKTKEAVFEAVFDQVSRDLVIEIDGAARAEKDVLAAMVAGTQHYFAATAKGPTGRIILRDGPAVLGWERWREIDAKHFGGKLPRALSIAMESGLVAKQPVEPLARLLLGAVTEAAVACAGRADIARAGTEYARAFKSLVEALRVTA

SEQ ID NO: 14330 - protein, 541 aa, BradyrhizobiumColbertium
MNANSSLAPSDPEFDYIIVGAGSAGCVLANRLSANGKHSVLLLEAGPKDSNIWIHVPLGYGKLFKEKTVNWMYQTEPEPELKGRQVFQPRGKTLGGSSSINGLLYVRGQHEDYDRWRQLGNTGWGYDDVLPYFKKAENQSRGADQYHGTGGPLPVSNMIVTDPLSKAFIDAAVETGLPYNPDFNGATQEGVGLFQTTTRNGRRASTAVAYLGPAKSRSNLKIETSAHAQRLLFEGRRAVGVEFRQGAALRRARARKEVVLSSGAYNSPQLLQLSGVGPGDLLRKHGIDVVLDAPGVGNDLQDHMQVRIVMRCSQKITLNDTVNHPLRRTMAGARYALFRKGWLTIAAGTAGAFFKTSSRLASPDIQVHFLPFSTDKMGEKLHDFSGFTASVCQLRPESRGSLRIKSADPAVPPEIRINYMSTETDRTTNVEGIKILRKILNAPALKPFVVSEYDPGEKVSTDAEILDYCRERGSTIYHPTSTCRMGNDALAVVDQRLKVRGLDGLRVVDGSIMPDLVSGNTNAPIIMIAEKASDMILEDAG

SEQ ID NO: 14331 - protein, 326 aa, BradyrhizobiumColbertium
MPTRFRIGTRKSAMALAQTEEIARRLTAAVPGLDVEIVKFDTTGDLDQTSKLLSHGGKGGAFVAQIRAAVVSGELQAAMHSLKDMPGNEDTPGLVIGATLSRDPPSDALVLREGVTLEALRQSRGKGLKIGTNAVRRAAYARRLFPEVEIIHFRGAADTRVRKLDNGEKQRLPDGGAVGPADALIMARSGLDRVGLANRIAYEFTATEMLPAAGQGIVAVECAAQDWQTRKILSAIDDPAAHASADAEREVLWVLNGHCNSPVAGFSTISGDHMSLTASVLDLSGNTIIEVSRAGPANRPRELGRAVGLDLLAKGAAEIIERSRPR

SEQ ID NO: 14332 - protein, 344 aa, BradyrhizobiumColbertium
MPQSAIKPFIDVLSGHRQAVPPVWMMRQAGRYLPEYREVRAKAGGFLDLCFNPELAAEVTLQPIRRFGFNAAIIFSDILVIPHALGRSVRFEVGEGPRLEPLDDPAKVATLASRADFSKLAPVFEALKIVRGALDPDVALIGFCGAPWTVATYMVAGHGTPDQAPARMMAYRHPEAFSAIIDVLVDNSIEYLLAQLAAGADALQIFDTWAGVLPPAEFARWSVEPTRRIVEGVRAKVPDAKIIGFPRGAAAQLPAYVEATRVSAVSIDWTAEPGFIRDHVQSKVAVQGNLDPLVLIAGGTALDRAVDDVLANFAQGRLIFNLGHGIQPETPIAHVEQMIKRVRG

SEQ ID NO: 14333 - protein, 75 aa, BradyrhizobiumColbertium
MEEIMAETFNPAPHDKLADDPHEALAADRQSKLDAGLKDTFPASDPVSAAQPTPSKADADADQPSLWDKVKAIFS

SEQ ID NO: 14334 - protein, 641 aa, BradyrhizobiumColbertium
MIGDLCRMTAVTTRPGWSRLALRAAAFVVLTCAAILGVSGWREWSARDTVLRSAETELANVARSLTQHAEDSLDLLDSGVVGAVSRLEIDGTGPITIAKLGTVLEARRKAIPRVHSLAVIDDQGNWLTSPGTIGATLSDDAFFRQHQLSPKREPYVGRPVKSLLDGEWVVTLSRRFNKQDGSFGGVVLATISSRYLSQFYEQFEIGRNSSIALTHGDGVIIARDPSNEKFVGRSVADTALFRDASLQRPSGAYHFESPLDGAQRVSFFWRSSRYPVVLLATLDKEELLAPWRADAISRMLYALALVMLIAVIGGVLVWQLHRGQRMAAALGEKEAHFRLLAEGSSDMVTRIGLDERLRYVSPSSVRVVGWRPDQLIGTPALAGINPDDLPEVQAIVGALKRDEREEARLTYRNAHRQNGEVWLESTMRVTRKSNGNVDGVVAISRDITEQKKLETKLETLAIEDSLTGLANRRRFDERLQEEWARAYRDRSSLALLMIDVDHFKAYNDEYGHPAGDACLRLVARIIAAETQRAGDLAARYGGEEFAMLLPNTDAAGCARVGERIRSAIHGAGLVHSTNPAAGCVTASVGGAACRPVLERTAGVGSLLEAADRALYAAKDAGRNRLVMSDEVTTLLPKVSGQ

SEQ ID NO: 14335 - protein, 72 aa, BradyrhizobiumColbertium
MTNEIKTLSERIDALETRLAYQDDTIETLNQTITAQWKQIDTLTRQVAQFNERLQEAEANAPGPANEPPPHY

SEQ ID NO: 14336 - protein, 265 aa, BradyrhizobiumColbertium
MSDPSSTIKVAAFYQFAALPDYRELREPLRAFCAGLGLKGSVLLAQEGINGTVAGLSEAIDTLAHELAHGSLFGGRLDNLELKFSTAAGMPFGRLKVRLKKEIVTLGDETADPTRQVGTYVDAAEWNTLIAAPDTLLLDTRNAFEVAMGTFEGAVDPGIKSFGEFKDFAAARLDPAKHRRIAMFCTGGIRCEKASAHLLARGFAEVYHLKGGILKYLEEVPEAQSRWRGECFVFDERVALGHGLRELGSRGRDLCEQDMGPGRDE

SEQ ID NO: 14337 - protein, 38 aa, BradyrhizobiumColbertium
MLSWPSAPVARLSKNRIYMTHSGPAGQCWHATKMAAIR

SEQ ID NO: 14338 - protein, 528 aa, BradyrhizobiumColbertium
MRNFHFPGRSTVHATNAMVATSHPQASLAAIEVLREGGTAVDAAVAGSALLGVIEPQSTGIGGDCFALVQPRGEGKIIAYNGSGRAPKAANADWYLERKINSVPLTSAHAVSIPGVVDAFATVLRDHGKFGFDRLLQPAIKAAEEGYVVAPRIAFDWKNQFEKLKAGTNTVRYLLPGGKPPVAGDVIRQAELGKTLRAIAKDGRDAFYKGAIAEDMVETLRGIGGLHTLDDFAAHTTETTTPIGTMYKGYDVWQCPPNGPGLTMLLMLNILSRFDLTKYAPLSVERFHLEAEAARIAYMHRELHVADPEHMQIEVAKILAKEFCDEHIAKIRMDGMLDLPNVAPPMNPSTIYITVVDKDRNVCSFINSIAHSFGSAIVSNKTGVLFQNRAGGFRIQPGHPNCIAGGKRPLHTIMPSLLTQGGRSVMPFAVMGGQYQPVGQTRVITNILDYGCDVQEAIDMPRGLHYEGQYQLEDSVPAAIVDGLKKLGHKTTSVVSPLGGAQAIWIDWDKGTLTGGSDPRKDGCALGY

SEQ ID NO: 14339 - protein, 204 aa, BradyrhizobiumColbertium
MPDKPGSRTSAFDRRAFLAGAAGSALVPMTARAAAQEANAPAAQDPSLPVEVTLRVNGKDNRLSIDARTTVLDALREHLKLTGSKKGCDHGQCGACTVLIDDRRVVSCLTLALAAEGQEITTIEGLATDDRLHPMQQAFIDNDAFQCGYCTPGQIMSAVACVKEGHANSEAEIREYMSGNICRCAAYPNIVAAVKQAAPEIVKG

SEQ ID NO: 14340 - protein, 325 aa, BradyrhizobiumColbertium
MAVQALGAAAAANNPVTKALVQPLAGGTTLIDLMKLDVMRPAAIVDINPLARGWSAIEPKSDGLRLGALAKMSDVAAHAEIERNYPVIADSLKLAASAQLRNMATLGGNVMQRTRCSYFRDVSYENCNKRSPGSGCAAMDGVNRMHAVLGVSDQCIATYPGDFAQALIALDAMAEITGKAGTRSMPFAQLHKAPGSTPDIETTLQPGELISAFSIQGRWPRSVYLKARDRQSYEFALSSAAVALDVQDGAIRDARVALGGVATVPWRAREAEALLKGQEFDEALARRAADAAFAEAKGRRHNSFKIALGKRVVARALQQAVTMEI

SEQ ID NO: 14341 - protein, 763 aa, BradyrhizobiumColbertium
MTAAAPGPKANMGRPVPRYDAAAKVTGRATYASDMPLDNPAYAFLVTSAIAKGRIDRFDLDDARRVRGVIEIVTHENAPKLKDSKLFSNGGYAGTTIQPLKSAEIAHDGQIIAVIVAERYEAAREAANRVKVSYTVSSPSATFDSPGATTAAAKGQNAQFKEDPKVGDFAKAFEEAEVKLTAAYDTPAQHHNPMELFTTSCAWMGDNLVIYEGSQYVYGLKNGVAEQLGIDVDKVRVVNPYVGGGFGSRGSMTPRTPIIAAIAKRLNRPIKLVPTRDQGFTITTYRAETRHEIRLGASRDGRLVALRHAGSEVSSRPDAYCVGGTKTTTRLYACPNVDSLVSIVRADRNTPGFMRSPPEVPYLFALESALDELAVKLDMDPIELRRINDATNEPIDGKPYTSRSLMACFDEAAKAFGWSQRSPQPKSMSDGDWLIGYGCAATCYPTQMAPCAARVRLQRDGRTRVEIAGHEIGTGAYTIIAQTAAERLGVPLEKVAVFIGDSDLPPAPVAGGSNSTASTCSAVMMVCDQIRQRLLKAVMPSDSLADKAKETVGISPAPSTQAAKSDRPLDIEKAFDALGVGIVEEYGEWKPDGAPMDSFTAMHRGQPRFVGGHQMKDKIAYAFGAEFVEVRINRFTHEIRCPRLVGAFAAGRIMNPRTARSQLMGGLIWGMSSALLEATEIDERYARYVNDNLADYLVPVNADVPGVEVIMLSEQDDHINPAGAKGLGELGNVGTNAAICNAIYHATGQRIRRLPVRLENIEV

SEQ ID NO: 14342 - protein, 154 aa, BradyrhizobiumColbertium
MQRFQRVLLAIMSALAITVIAGVTDFVSTPASAQTAGKIMTTASGLQIIDSTVGTGASPQPGQICVMHYTGWLYENGQKGKKFDSSVDRKEPFEFPIGKGRVIAGWDEGVASMKVGGKRTLIIPPQLGYGARGAGGVIPPNATLMFDVELLAVK

SEQ ID NO: 14343 - protein, 81 aa, BradyrhizobiumColbertium
MRAKWKESFMGSTTDKIKGTANEAIGNAKQGIGEATGSDRMKGEGVVQEAKGKGQQAMGDAKDAGKEAMDRAAAAAKRATE

SEQ ID NO: 14344 - protein, 147 aa, BradyrhizobiumColbertium
MRVIPGNQLDTNVPSTAGMDRAAAINFARVGAQKLWAGTVSIKPDAKTGAHHHGHLESVIYVVKGKARMRWGESLQFTAEAGPGDFIFVPPYVPHQEINASPDEVLECVLVRSDGEAVAINLDIEPVEKPETVLWIDPVHRDPNEKK

SEQ ID NO: 14345 - protein, 142 aa, BradyrhizobiumColbertium
MPKMIFVNLPVTDLKRATAFYEAVGAVKNPQFCDETASCMVFSETIYAMLLTHDKFRQFTPKPIADARTSNQVLLCLSADSRSDVDDIIVKAAAAGGVADPSPKDEYSFMYGRSFEDPDGHMWGVNWMNLAAAPLQPDLANV

SEQ ID NO: 14346 - protein, 162 aa, BradyrhizobiumColbertium
MSKLVPCMWFDGDAEEAAKFYVSLVPNSEITHVQHNVSDGPSGKEGSVLVVEFTIAGQPLVALNGGMKMEYTHAISLMIHCDDQAQVDSVWNAFLAHGAKEEQCGWLRDRWGVAWQVVPTVMFEFLSSPDKAAAARAMQAMMKMVKLDVDVLRRAFEGKSAA

SEQ ID NO: 14347 - protein, 388 aa, BradyrhizobiumColbertium
MRTLTMAKLNVRRLILAVALTATAAFALATLDARPAAAQESECGSECEPNPTPSPTYSPSPSPSPTPTPSPSPSPYPAPSPSPYPPPSGPTGADSSGNSIGGLANQRFNQMITNRVLGTVLLGVNEQINCGDCVSAFGSAGSFSAGVHGRKALTNNLSLLAGIAYTHYDGGGYKITSAPIGAFALRYDFTDWGSSRPFFDVGAILTPWEKARYTRSYDTSLGPVSVTSSTNASNYAVYGRAGWISRLSPRDEVAASIEVWQLWQRVSGYSDSAVAFNPFDASIADGTDRTSLVKIGGQWTHLFGSNIETNINGGWVQSFASHSGIVATVIGNGTVVPTMGNQGWFEYGGRLGFRVQKGWIVDLFANGTLGPQPVGNTIHGGVGLRINY

SEQ ID NO: 14348 - protein, 233 aa, BradyrhizobiumColbertium
MNLRFWLFSILSSAALCTASAAPAQTRVGQAVVIQNEVVRVAATTTPINVGDSMLRDETVRTGADSAARFVMADSTNLSLGPSATLKLDRTVFNDEHSYRDVAIRMTTGAFRFVTGNSDKAAYKITTPLATIGVRGTTLDILSQRGRSVVVLQDGAASVCTRSGQCVQLTQPGETAVITSTGGKVSITKSNTPPWTFAANCAASAGLCAVNQYADASPTITPAVQDDGMLCGR

SEQ ID NO: 14349 - protein, 420 aa, BradyrhizobiumColbertium
MSRSAVIAVAIFLIAHLALLIGLTTPEKFVFDEVHYVPAARQMLAPVMSQPMLNPMHPPLAKELMAASIAAFGDNALGWRYPATLFGALAIVAIYLCGLALFSARGPAIAAALIAGLNQMLYVQARIAMLDIFALGFGLLATAAFMHGFRRERPQTMFAAAGALFGLAAACKWSGLFPLGVCIVIVAVIRLMQGWRTLFADARPDDWYRPELWRGLKLHHLALCFAILPALTYLAAFVPLNGLSLPDLFEAQRRIFVDNTTTAIAGHTYMSSWPSWPLLARPVWFLFDKTAEDNVAAIVFLGNPLVLWPALLALIIVLRDFIVARRWDAFLIAAFYFGPWLAWALLPRTLGFIYYYLPAATAASLALVYVLRRHGMPRWLLWAYVGVAAAGFAVMLPISAAFIGASMKSFNRLMLFQSWI

SEQ ID NO: 14350 - protein, 213 aa, BradyrhizobiumColbertium
MTRFDKFFGLKAMTLTAALSMTASLAMAGDNNVSTDKILDALKPKPATRGLSVGPQTDTTVQAKEATFLNTVRNRPTRSLSMGEREQIAELAATKPKIDLEIQFDYNSADIAKTSMASVQALGKALSDPALKGSTFVVAGHTDATGGEEYNQGLSERRADTIKKYLVQNYGLNGNDLVTVGYGETKLKDAANGADAVNRRVQVVNMETKTASK

SEQ ID NO: 14351 - protein, 83 aa, BradyrhizobiumColbertium
MFVSSMPIYVGAAMIAVAILLSTLITGLTSRYVGLGAPNEENMWLVDRLTGEVYRCQSEGRGKASCEPDVATGSVEERPKAAR

SEQ ID NO: 14352 - protein, 81 aa, BradyrhizobiumColbertium
MKTLLLATAFVALALTPASAAKMACTSANMAKLVAGMGGEDTPGKVAARKSMASANSDMSKRNMRGACKHYMNAEKAMAMK

SEQ ID NO: 14353 - protein, 386 aa, BradyrhizobiumColbertium
MSRTPKPLPLTTTQARQIWLHAQRLDERIPFGEGAQAVADAVAHLGYVQIDTINVIERCHHHILFSRIPAYRRADLRQAQSVDKSVFEYWTHALSYVPASDFRFFLPAMREHRREGHKWFASVKPADTRKVMRLVRGGPLTIRDIDDDVLVEKEHLWQSRKPSKRALQLAFYTGAVTISERQGMLKTYELMTRHFGWDKLPKPASARETTAYLLDRALRSQGVVSLDSICYLDAPSKKPVARLIASRVRRGELVPVTVEGAGKQEHWGPPAALEPHEVPSDLVHILSPFDPLIIQRKRTNLIFGYNHLFEAYVPKAKRKLGYFALPVLVGDEIVAALDLKTDRQNKKLLMQKWTWVGEGRKTGRRKELKRVIEDELDRFERFQLAE

SEQ ID NO: 14354 - protein, 142 aa, BradyrhizobiumColbertium
MRVAQPDRPVALLRRSLVRAILALAVIVCGLSLRWYGFPLGLPAFIVKYGGSLLWATMVFLLVGVLLPRLTGSGLAAIAAAIAIAVEFSRLVHTPWLDAFRLSTAGALLLGRIFSLWNLVAYAIGILFGIFIDRLVAKRRAS

SEQ ID NO: 14355 - protein, 446 aa, BradyrhizobiumColbertium
MSQTTYAGSAGGAKNANKSDIETSTIRAISWRLIPFLVLAYFFSYLDRVNLGFAALTMNADLKFTPLIFSWGAGIFFIGYFIFEVPSNLALEKFGASRWIARIMVSWGIISALMAMVSGVTSFYVLRFLLGVAEAGFFPGIILYLTYWYPAEYRARFLAAFAIAVPVSTVIGAPISGLLLGLDGMMGLKGWQWLFIIEGIPSVLLGIVTWFYLTDKPEKADWLSAEQKAWLKAKLDSEIAAKQAVKHFSLGEALSSPKVIALSLIYFGFVGALYGMQFWLPQIVKAFGLTNAQTGFVTAIPYLFGTIAMILWARHSDATRERVMHVGAPLLLTAVALGISSYLANPTLTMVALTVAAIGVFCCFGVFWTLPTAWLSGTAAAGGIALINSIGNLAGFGGPYLIGWVKEATGQTSTGLLVLAVLPLIAGLLVFVGGHDSKHEFAGHGR

SEQ ID NO: 14356 - protein, 368 aa, BradyrhizobiumColbertium
MFVRSVLSSYSRLLAGVSLALMAAVLTGCNDTVAEKAEPPRPVLVATANYNAETPERSFVGTIRPRIESDLGFRVAGKVAKRLVEVGQTVEVGQPLATLDEVDLKLQAEQAVAEQTAATGVLAQAAAAEQRAKDLKAKGWTTDAQLDSSRAAADEARARLNRAERSVELTKNSLSYATLAADARGVVTATLIEPGQVVAAGQASIRVARFAEKEAVVAIPETLVGRAKSGVASVTLWSEPNKKYAAKLREIAPAADPATRTYLAKFSLPEADDKVSLGMTATLTLSDAATERVARLPLSALFNEGGKPSFYVVDDNGNVSLKPVMVKSYESKDVVITGGVEEGAKIVALGVQKLDPGQRVRIVSSLSF

SEQ ID NO: 14357 - protein, 65 aa, BradyrhizobiumColbertium
MQKRQPLCSNRHREAAKQPRGLGRFWIASPLQPQHLRSGRNSPCKDGTYSSRHSGRPAGRARNDG

SEQ ID NO: 14358 - protein, 1045 aa, BradyrhizobiumColbertium
MKRFNLSAWAVSHQTLVLFLMIVLGAAGFFSYQKLGRAEDPFFTVKVVNVSVIWPGATAQEMQTQVADPIEKKIQELPYFEKVQTYSKPAFTALQVTFRDNTPPKDVPYLFYLLRKKLVDVQGQLPAGILGPVVNDEFSDVDSILYMMTGDGADYAQLKKVSEGFRQRLLKVPGVTKVDVYGNQDERIFVEFSHAKLATLGITPQALFDSLAKQNNVTPAGTVETSSQRVPLRVTGALDGAKAVAETPVESNGRVFRLGDIATVTHGYVDPPSFVVRQEGKPAIGIGVVTAKGANILDLGKEVEKATADFMKAVPQGIDVKLIADQPKVVEHAVGEFVRSFMEALVIVLFVSFLALGWRTGIVVALSVPLVLGIVFIVMNAMSLDLHRITLGALIIALGLLVDDAIIAVEMMVVKMEQGWDRMRAASFAWESTAFPMLTGTLVTAAGFLPIGFANSAVGEYAGSIFWIVAIALVASWFVAVIFTPYIGVKLLPDMKAHHNHDPHAVYETRMYRGLRAIVRWCVNHRITVVVATVGVFVASIVGFGQVQQQFFPLSERPELFFQLRLPEGTAFNVTEKAVKKAETLLKDDKDIETYTSYVGQGSPRFWLGLNPQLPNEAFAEIVIVAKGVEARERIKAKIENAVADGMLTEARVRVDRFNFGPPVGFPVQFRVIGPDANKVREIAYQVRDVMRQNKSVKDVQLDWNEQSPYLKLVVDQDRARAMGLTPQDVSQALAMLISGSQVTTVRDGIEKVGVVARAIPSERLDLGGVGDLTITSRNGVAVPLQQIARIEYAHEEPIMWRRNRDMAITVRSDVVDGVQAPDVTNQITPKLKPIMDHLEPAYRIEPGGAFEESAKGNASIFILFPVMVMVMLTLLMIQLQSFSRLILVFLTAPLGIVGASLGLNVANAPFGFVALLGLIALAGMIMRNTVILVDQIETDVSHGLTRREAIVEATVRRARPVVLTALAAILAMIPLTRSAFWGPMAITIMGGLFVATFLTLLSLPGLYALWFRKSLDEAGSVEQPAASQHGSDEHPAIPLAEAAE

SEQ ID NO: 14359 - protein, 199 aa, BradyrhizobiumColbertium
MTLVAEHIEGDTRDRILEVAERLFRQIGYQKTTVGDIAKELRMSPANVYRFFESKKAIHQAVARSLMGEVELEAQRIVAKPGPVRERFRELLTTIHRMNTERYVGDNKLHEMVEIAMQEDWQVCVNHMECIAGVVGQMIAQGVASGEFEAPDLQLAALCSCTAMMRFFHPQMIAQCATKPGPTIDQMIDFVITGLSPRH

SEQ ID NO: 14360 - protein, 43 aa, BradyrhizobiumColbertium
MAGKDGSTNPVIASAAKPIQAVPKEGFWIASLRSQCEYGEASA

SEQ ID NO: 14361 - protein, 207 aa, BradyrhizobiumColbertium
MTDKDLYFYEPSKGHGLKHDPFNAIIAPRPIGWISSRDAKGHVNLAPYSFFNAFCYVPPIIGFSSTNWKDTVSNMEQTREFVWNLTTMDLAKHMNATAAHVAPEVDEFKLAGLTAVPGKLVNVPRVGESPVAFECKVSDIVRLKGADGKQADAWLTLGEVVAVYIDKALIKDGVYQTAAARPIVRAGRRGDYFEIKPENMFEMIRPD

SEQ ID NO: 14362 - protein, 755 aa, BradyrhizobiumColbertium
MSFRRDTVTKPIFSWARGVLPSMSDTEREALEAGDVWWDADLFTGNPDWSKLLKVPQAVLTDEERAFLNGPVDELCAMLDEWKIFWEWRDLPPDVWHFVKREKFFGMIIPKEFGGLGFSPYAHSEVVRKISTRSIAAAVTVMVPNSLGPGELLMRFGTKEQQQRWLPRLADGRDIPCFGLTSPEAGSDAASMVDTGIICKGEFEGREVVGLRLNWHKRYITLGPVATLLGLAFKAYDPDHLVGSQDELGITVALIPTNLPGVEIGQRHLPSMQVFQNGPNWGRDVFIPLDYVIGGKERLGQGWKMLMTALAAGRGVSLPSLSAAGAAYAARTTGAYARIREQFGISISKFEGVEEPLARIVATAYQLDAARRLTCAALNAGIHPAVISGIMKLHATERMRIAIDDAMDIHGGKAVIDGPQNYLGNLHRAVPVGITVEGANILTRNLIVFGQGAIRAHPYLLDEMNALADTDRERGLGAFDKAFWKHVGHSFQTLFRAFGRSWTFGAFAPAPDAGDATPFYRQLSRYSAAFALCADMALLTLGGALKRKEMLSARFGDILSELYLLSAALKRWQDEGRQKEDFAALEWCMATGFKTIENRFAEILANLPNRFVAAVLKFVVQPFGARVLGPSDRVVHQCASLVLEPSAARERLTPDLAYVDDDGGFARLERAFELVASTDAVARRMRAAHVRDWKQAVAKGVITQAEGEQLAAAREAVRGVIEVDDFAPEALSPIYKKTGDVHQFFQELGEQRAAS

SEQ ID NO: 14363 - protein, 427 aa, BradyrhizobiumColbertium
MARPVFIVDGSRTPFLKARSGPGPFTPVDLAVQCGRPLLARQPFAPDSFDQVILGCVNVVADEMNPARVAALRLGMGEDMVAFTVQINCGSGMQSIDTAYRYIREGHADMILAGGTEALSHAPLVWPNSGVRWFAGLATARGMAAKLAAAFKLRPRDLKPVIGLERGLTDPVTELNMGQTAEVVGHLFGITRTQSDAYAAESHRRLAHAQSAGFLKGEVETAFSRDGKFFDHDDGVRPDSTVESLAKLRPVFERPWGQVTAGNSSQITDGASWVILASDAAVAKHKLTPKAAIVDSHWAALDPSIMGLGPVMSATPLLQRNDLTIKDVETWELNEAFATQVLGCLAAWNDDKFCREILGLDGAAGQIERERLNVDGGAISLGHPVGTSGNRIVLHLVNAMNRLGTRRGVATECIGGGLGGAMLIEAV

SEQ ID NO: 14364 - protein, 698 aa, BradyrhizobiumColbertium
MDSKIMTALGDRVLELGPQPAAESPYKHFKLTRDADGVAWLLFDRADASANTLSSEVMEEFDAVLAAIENERPAGLVIRSAKPSGFIAGADVNEFRGVSDPGVVETRIRAAHAVVEHLEALRLPTVAVIHGFCLGGGLEVALACQARIAIDGARFGFPEVMLGLHPGLGGTARFTTLVNSTQSMSLMLTGRTIDARRAKSLGLVDAVTQERHVRGAVKDALFGRLERAKPGLFTRAANLGLVRGLLAKRMRAEAAKAASREHYPAPYALIDLWEAHGGSKAAMLKAEQASFAKLMVTPTAQNLIRVFFLREQMKRAAGGGNAIKHVHVIGAGAMGGDIAAWCAGQGLRVSLADMKAEPIAGAVKRAAELYGKIIRKRTDVRDALDRLIPDMDGEGVRNADLIIEAVPERLELKQKVYATLEPRMKPDAILATNTSSIPLQDLRMTLARPERLVGLHFFNPVSRLQLVEVVSHDGNDPQILKQALAFVGAIDRLPLAVKSSPGFLVNRALTPYMLEAMVMLDEKVDQRLIDAAAEQFGMPMGPIELADQVGLDICLDVGDMLRTKFGDLLPPTPAWLREKVAKGELGRKTGKGFYTWKDGKAEKAPLAETGPRVTDQMIDRLVLPMSNVCVAALREGIVDDADAVDGAMIFGTGYAPFRGGPLNYARTRGAENVLSTLRALAERFGERFAPDPGWDSFK

SEQ ID NO: 14365 - protein, 136 aa, BradyrhizobiumColbertium
MSEHATTGPSGDLCIRTLAMPADTNANGDIFGGWLLSQMDVGGGVFASKAARSRTVTVAIEAMNFRKAVYVGDLVSVYANLVRVGRTSLTVHLEAWALRRKELHPFLVTDGNFTYVSIDDHGRPQAIQRNDPPIAT

SEQ ID NO: 14366 - protein, 63 aa, BradyrhizobiumColbertium
MPDSYIIEVNSQTAGIVVRSQGGYCFFASSHRFNRLEGQLFRNAREAERAARKLVNGDVKEAA

SEQ ID NO: 14367 - protein, 185 aa, BradyrhizobiumColbertium
MASIAQRRMRIPAHATLDKSAGDCNTPAKTKKEETMTINRRDLALSTFAVSALAFATPARAASADEEAVARKVEAFRLAQIAADPKALGALCADELSYSHSSGKVEDKATFITNATDGKSKFLSIEYKDPTIKVVGPAAIVRFHWLGEQEMAADGKKVSTNLHILMNWQKQGDEWKLLSRAATKL

SEQ ID NO: 14368 - protein, 228 aa, BradyrhizobiumColbertium
MIEASHDARGRALLFDIDGTLADTDPLHLKAFNQVLGPHGHVFDHARFSRELQGFANVAIGERFLPHEAPERRALILDEKEEVFRTLVAGQIAPLPGLMALLDRADSAGIPMVAVTNAPRLNAELLLAGLGITHRFKAIVIGAELPHGKPHPLPYQEGLRFVGARPETSIAFEDSRTGVQSAAAAGIPTIGIRTSLSHADLIAAGAVTSAGAFDDPALLTRLADAMAW

SEQ ID NO: 14369 - protein, 282 aa, BradyrhizobiumColbertium
MTGLTHRQAEILNIARASGRVMVEELARRFEVSAQTIRKDLNDLCERRSLTRIHGGAIIASGVENLAYEARRFVAADEKKAIGAAAASLIPNGCSLFINIGTTTEEVASALTSHEDLLVITNNLNVAMLLYRHPRIEVVVAGGTVRRADGAVVGSTATQLIGQFKVDYAIIGASAIDEEGALLDFDYREVQVAQAIIANARSVMLVADSTKLRRSAPVRIAHITQIQTFVTDQELPERLATICHSKGIEVVEALPKGLGENDEPQADAQDAAPEAAPVVRLR

SEQ ID NO: 14370 - protein, 516 aa, BradyrhizobiumColbertium
MRLLERIFDLAIIGGGVNGCGIARDAVGRGNTVFLCEMNDLASGTSSWSTKLVHGGLRYLEYYEFRLVREALIEREVLWGIAPHIIRPLRFVLPHHAGLRPAWLLRLGLFLYDHIGGRHLLPATRSVDLRRDEVGKPLIPNRYARAFEYSDCFVDDARLVVLNARDAADKGAEIRTRTRATEIRQSDGLWTVGMVNTLTGERSQIQARALVNAGGPWVEDVLGRGAGVNAKAKVRLVQGSHIVVRKLYDHDRAYMFQNADGRIIFVIPYQDDFTLIGTTDRDYDGDPAKVKATAEEIQYLCAAASEYLAKPVRPEDVVWTYSGVRPLYDDGASEAKAATRDYVFELDTPGGVPLLSIYGGKITTYRRLAEEALERLAPYLRSAKAREGWTGKWPLPGGDMNVSDIDGLIAELQRGYPFLGHEHARRLARAYGTRAIKLLGDAKSAADLGLAFGATLTEREVRYLMANEWAVTAEDVVWRRSKLGLRLSADEIAALDDWVRTHAVQQSPLLEAGGRS

SEQ ID NO: 14371 - protein, 359 aa, BradyrhizobiumColbertium
MTVTLDHVTRTVEGVPHIRDVSLTLESGTLNVLLGPTLSGKTSIMRLLAGLDKPTTGKVVVNGKDVTGADVRQRSVAMVYQQFINYPSLTVYENIASPLRVQRKPRDEIEARVAEAAKLLRLEPFLRRTPLQLSGGQQQRTAIARALVKGADLVLLDEPLANLDYKLREELRAELPRIFEASGAIFVYATTEPTEALLLGGNTVCMWEGQALQIGETTNVYRRPQTLRVAQVFSDPPLNLVGIEKKNGQVAYAGGTASSPASGLYAGLADGAYRVGFRAHQLGLANGQTDRHAFHATVTVTEITGSESFVHLTRDGSNWVAVLHGVHEFEPGQTLDAVLDPNDVFVFDAADRLVAAPGS

SEQ ID NO: 14372 - protein, 361 aa, BradyrhizobiumColbertium
MARIDLVDLAHSYGGNDAAPESFALKPVTMTWRQGGAYALLGPSGCGKTTLLNVISGIITPSRGKILFDGVDITPLSTQKRNIAQVFQFPVIYDTMTVGQNLAFPLKNRGVPKAEIDKRVAEIGRLLDLEPYLHRKATRLTADAKQKISLGRGLVRSDVAAVLFDEPLTVIDPELKWQLRSKLKALHRELDLTMIYVTHDQTEALTFADTVVVMHDGRVVQSGTPAELFDKPAHTFVGYFIGSPGMNILPAQVRGREARIGGHVIALNRAYDNLPAGAKIEIGVRPEFVEAVAPAPGLLTAKIERIDDLGRIRFARTRLGDAKLAARAPSGFTSADGTAGLKLDPSHVHVYADSLLVEGAA

SEQ ID NO: 14373 - protein, 300 aa, BradyrhizobiumColbertium
MDKTVNQKAWFLVLPVFLVVAFSAVLPLMTVVNYSMQDTFGNNQFFWNGVGWFKELLDPSTDLGGRFLASLGRNLFFSLVILAIEVPLGIVVALSMPREGWTVAACLVILALPLLIPWNVVGTIWQIFGRPDIGLLGYALNAIGLDYNYVSNDVDAWVTVIVMDVWHWTSLVALLCYAGLKSIPEAYYQAAQIDGASRWAVFKAIQLPKMNRVLLIAVLLRFMDSFMIYTEPFVVTGGGPGNSTTFVSIELVKIALGQFDLGKAAALSLVYNLIILIVCWIFYTVMTNAGAERAVKEGAA

SEQ ID NO: 14374 - protein, 268 aa, BradyrhizobiumColbertium
MHSIPGRRLIMGLFLVFLLLPIYWLVNMSFKTNSEIVSTMTLWPHTPTLQHYKRIFTDESWYSGYINSLTYVVLNTIISISVALPAAYAFSRYRFLGDKHLFFWLLSNRMAPAAVYALPFFNLYSAIGLFDTPWAVALAHCIFNVPLAVWILEGFVSGVPREIDETAFLDGYSFPRFFIKILVPLIASGIGVAAFFCFMFSWVELLLARTLTSVHAKPIAAIMTRTVSAAGMDWGLLAAAGVLTIIPGALVIWFVRNYIARGFALGRV

SEQ ID NO: 14375 - protein, 109 aa, BradyrhizobiumColbertium
MESIAWMAWTLPTAIFFAALACTLAVMTWLAAVYPEAERVGVLRIPTTRGDRLFISLIAAAVIHLVWIGLVGTDPIATLPIGEEGLEISSLWLASGISLLTAVLIFRTV

SEQ ID NO: 14376 - protein, 588 aa, BradyrhizobiumColbertium
MTKSSFLTMSSAAAIVAVSFALSAPVRAADEATIQKWIAEFQPSTLSKEDQKKELEWFAKAAEPFKGMEINVVSETITTHEYEAQTLAKAFSELTGIKLKHDLIQEGDVVEKLQTQMQSGKNVYDGWINDSDLIGTHFRYGQTIALSDYMTGEGKDVTNPMLDVNDFIGKSFGTGPDGKLYQLPDQQFANLYWFRYDWFTNPDYKAKFKAKYGYELGVPVNWSAYEDIAEFFTNDIKEINGVKVYGHMDYGKKDPSLGWRFTDAWLSMAGNGDKGIPNGLPVDEWGIRMEGCRPVGSSVERGGDTNGPAAVYSITKYLDWMKKYAPPQAQGMTFSESGPVPAQGNIAQQMFWYTAFTADMVKPGIAVMNADGTPKWRMAPSPHGAYWKEGMKLGYQDAGSLTLLKSTPPDRRKAAWLYLQFIVSKSVSLKKSHVGLTFVRESDIWDKSFTERAPKLGGLVEFYRSPARVQWTPTGNNVPDYPKLAQLWWQNIGDASSGAKTPQQAMDALAAAQDSVMERLEKSGVQGACGPKLHKKEKPEYWFAKAEKDGTIAPQRKLANEKPKGETVDYDTLIKSWPAQPPKRAEAK

SEQ ID NO: 14377 - protein, 366 aa, BradyrhizobiumColbertium
MSRPTKLFETYKLGPITLANRLVMAPLTRNRAVPGTFVPGPLAADYYGQRASAGLLITEASQVSQQGQGYQDTPGIYSKDQVAGWRKVTDKVHGRGGKIFIQLWHVGRISHVDLQANGAAPVAPSAIRAKGKTFVNGGFADVSEPRALELSEIPGIIDDFKRATKNALEAGFDGVEIHGANGYLLDQFAKDGANKRTDAYGGSIENRARLMLEVSKAVAAEAGADRTGIRISPVTPANDISDSNPQPLFEHIVDGLSALKLVYLHVVEGATGGPRDFAPFDYASLRKRFSGAYVANNGYDFDLATKILDANAADLIAFGKPFISNPDLVERLKQGAPLNEWDKTTFYGGGAKGYTDYPTLAAEPAE

SEQ ID NO: 14378 - protein, 167 aa, BradyrhizobiumColbertium
MSFYDAVVPAYLQMLNSVTGLLTKAEAHCAAKKIDPGVLLGARLFPDMLPLSRQVQLVSDFAAKGCARLTHSEVPSTLDTETTFAELKQRLAKTIDYVKSFKPEQFEGAEARDVTFPSGPNKTTTMKGQQFLSSFSLPNFYFHAATAHGILRHNGVEIGKRDFMGAN

SEQ ID NO: 14379 - protein, 432 aa, BradyrhizobiumColbertium
MLLTRFAIAATALFALSAPASAQLAPPAKTAAPRPTAALPRAASCHNGASFDRFLADVKQQAVAAGVSQRTIAEASPYLVYDQGIVNRDRGQRVFGQLFTEFAGRMAAPYRMQNGQQHIKQYAAAFARAEKEYGVPPAVIAAFWGLESDFGANMGNLPTLKSLVSLAYDCRRSEMFVGETIAALKIIDRGDLHPDEMIGSWAGELGQTQFLPVHYVNYAVDYDGDGRRDLLRSPADVIGSTANYIANGLKWRRGEPWLEEIRGPPTLPWEKTDLTVREPRSTWAQLGVTYPDGRPLPNDNLAASVLLPMGRNGPAFLAYANFAAYTEWNNSLIYSTTAGYLASRIAGAAPMRKPAQPVAQLPFSEIKELQQLLVRAGHNVGKVDGILGQQSRTAVKAMQIKFGLPADSWPTAELLARMRGSTAQAQPAATIR

SEQ ID NO: 14380 - protein, 315 aa, BradyrhizobiumColbertium
MNYFRTAMLLAGLTALFMGVGYLIGGASGAMIALVVAAATNLFTYWNSDRMVLSMYGAHEVDRSTAPELVGLVAELAGRAGLPMPRVFVMDEVQPNAFATGRNPENAAVAVTTGLMNQLSREELAGVIAHELAHIKNHDTLLMTITATIAGAISMLAQFGMFFGGNRENNNGLGIVGSILMMILAPLGAMLVQMAISRTREYAADNLGARIVGQPMWLASALVRIEGAAHQVPNYEAERNPATAHMFIINPLSGHGVDNLFATHPSTQNRVAALQQLAAELGARAMPSVGANENYPPRSPWGRSSSRGPSRGPWG

SEQ ID NO: 14381 - protein, 232 aa, BradyrhizobiumColbertium
MTNSSKGDARPDLCRSPSKMTRAAVLFLIVLCVLAGLSTHMVVNCGDEDDPDICSAVIGFSPLRGSLIAFAYEGRGRIALRHGDFKRAIADFDEAIHLNPNRGSLYRDRALARRLNGDLELAIADYDEAIAHDPKRAAPYHQRGLALAAMGDLDRAILSYSTAVRLDPSDAQARLDRGLAFLARGQADDARADFEAALALPAGKESGMRDLARAKLAELASAEPTQVATPRR

SEQ ID NO: 14382 - protein, 117 aa, BradyrhizobiumColbertium
MADADLDVVIRQLARQLHTGLMTRAKERRDRLNGLAAKAKGKETGERFKMMAKATMEQATTAAKRLQMSADNVADSYARSMRLAASAPVAVKAEKKAKEDKPAKKAAKAKAKAKKAK

SEQ ID NO: 14383 - protein, 266 aa, BradyrhizobiumColbertium
MRIALLLTATIVGAFFAGPSHAGSLDADAVQTLPPGFQSYRGYMFDLSENSDRKDVDKLTDNLKQQIDVVESAGLSPRVLRFFRTVPIIASELACLDEGAATACYGRVAPNVERRVPRTLTVWDHDKQRWTNPNAVDLAVDSGLGVIMLRPDMMRYEKEAVLLHELLHAYHARLLPDGYANKGVIAYYALAKSKDMLPKESYALKNPMEFFAVTASIFLAGKSEFHDPKSREALKEKMPDYYKYLVGVFGFDPAPAASNGPVASLK

SEQ ID NO: 14384 - protein, 77 aa, BradyrhizobiumColbertium
MKIITTFACSALIAVVALAGSAQLKPATAGSFDWLGNENYVRCLKYVSALAKSAAGLDRGRRACNRAHYPGRPGYDY

SEQ ID NO: 14385 - protein, 481 aa, BradyrhizobiumColbertium
MPAASGKKLFVGPRFRRIRQQLGLSQTQIAEGLGISPSYVNLIERNQRPVTAQILLRLAESYDLDLRDLATADEDRFFAELNEIFSDPLFRQIDVPKQELRDLAELCPGVTHALQRLYAAYTEARQGETLAAAQMADRDVGTRYEANPVERVRELIEANRNYFPELEQAAENLRDELNVPAEGLYAALAARLREKHSIQTRIMPVDVMRETLRRFDRHRRQLLISELVDPPGRAFQLAFQLGLGECAQALETIIGRAGPLDDAPRRLFRITLGNYFAAAVMMPYPAFLAAAEALNYDIHVLAQRFNSGFEQVCHRLTTLQRPNARGIPFFLLRVDNAGNVSKRFSSGTFPFSKFGGTCPLWNVHSTFDTPDRLLKQVIELPDGTRYFSIAQMVRRPVAPHPLPQPRFAIGLGCEIRHAARLTYATGMDLEKAEGTPIGVNCRLCERENCAQRAEPPITRTLILDETTRRVSSFAFSNAREL

SEQ ID NO: 14386 - protein, 41 aa, BradyrhizobiumColbertium
MPDPFADDGMAIDILDSALRYACQKLNAKTETSYRWLVSYW

SEQ ID NO: 14387 - protein, 543 aa, BradyrhizobiumColbertium
MNYQPRGISTLQGPSSYLDEVKAAQALIETQPTWNGVTAEAVARMRLQNRFKTGLDVARYTAAVMRADMAAYDNDPTKYTQSLGCWHGFIAQQKLISVKKHFGKTDRTYLYLSGWMIAALRSEFGPLPDQSMHEKTSVPALIQELYTFLRQADARELNDIFRLLDKARKEGDKTREKELIEKIDNFQTHVVPVIADIDAGFGNAEATYLLAKKMIEAGACALQIENQVSDEKQCGHQDGKVTVPHDVFLAKIRACRHAFLELGVEDGVVVTRTDSLGAGLTQQIAVSHKPGDIGDQYNSFLDCEEVTPENARNGDVIINRNGKMMRPKRLPSNLYQFRPGTGADRCVLDCITSLQNGADLLWIETEKPHIEQIASMVDRIRKVVPNAKLAYNNSPSFNWTLNFRWQVYDAWKEAGKDVSKYNRADLMKAEYDETPLAQEADERIRTFQADSAKRAGIFHHLITLPTYHTAALSTDNLAREYFGEQGMLGYVKNVQRAEIRQGIACVKHQNMAGSDIGDDHKEYFAGEAALKAGGVHNTMNQFG

SEQ ID NO: 14388 - protein, 70 aa, BradyrhizobiumColbertium
MTKGSNFWVIGGEFGSMNFHKLVEGSAQVKGPFKTRKEAEDCWREVSEESRHKAGVRFSIVEEPQRAPAA

SEQ ID NO: 14389 - protein, 183 aa, BradyrhizobiumColbertium
MSEPETSGIPGQPRPVRLRDALLRARIEAADRTGVVVDLRDAEVARLEILNDALDPLFAQVPDQIDLFDRGISQGDTPRLWIDVVAHIVMGRDKRMYRFVQDTRFGRIVLAESHDTAVIVEAVTDYVARRMVERERAMVVTPAPQAPVAEPPRRSRFWPFVFGFVLGAAALFGVALLAVLRNW

SEQ ID NO: 14390 - protein, 294 aa, BradyrhizobiumColbertium
MAPFTLAHLSDPHLAPLPKPRLIELAGKRALGYVNWTRNRHKYQRREVLDALVADMKAQAPDHIAVTGDLVNLALEAEFAPALAWLESVGPPDRVTAIPGNHDAYVSATRHRFGETFLAYIAADAPGAAAFPAVRRRGPLALISLSTAVPTLPLMATGTLGRDQLAALAEVLERLAKEDVFRVLLVHHPLKSDARQKRMTDAPELLALLKRHGVELVLHGHDHVHSTIWVEGPNGNIPVLGVPSASALAHGRYPAAAYNLLTIEKDNAGWRCEQTVRSLGAGFQVGQIKHVRLI

SEQ ID NO: 14391 - protein, 163 aa, BradyrhizobiumColbertium
MGERLNRVRRKAEPLLRRVFHAYFLVVRGMTLGVRAVVLDADNRVFLVRHSYVSGWYLPGGGVDFGETMEEALRRELKEEGDIDLTGEAVLHGIFLNSHVSRRDHVAVYVVRQFRQDRLPGPNREIVECGFFDNTALPEGTTPGTRLRLAEVLDGRPPIATWR

SEQ ID NO: 14392 - protein, 383 aa, BradyrhizobiumColbertium
MKTAKLAFGLICLAILASNIATMSRWSEARGVYDDICYLRQAHLFQRVGLGGLNTNAALDDDRYFEGKLKQIAFAEWRDPIRWPCHNPMPNGKIVMQYPPGTGFLLALFPEGNQVVPLYIAASLIVCGLALAGIAMARTLSSVAGAGLFGALAVYLMINPAKASYSIAPTMAVCAVAGCLTALWLTRDKRNVLLIALIGLLLGASVNFRLPNALLVAGYVIYLGVAFLRVRTLSAFAQGLGFGLAVLLGMAPTLIAQAINAGSPLATTYGSADVVAPAFDLAVLGQYLRDMQFVLIVLAIGSTAWLLRVGKGSVRQVALVVAGNLTVNLVFFLSHPVFTPYYIVPIAMLSLWSASFAWLIQPGQASQAVPFGREPTGLGATSR

SEQ ID NO: 14393 - protein, 311 aa, BradyrhizobiumColbertium
MTSTQLRIAVLVPCYNEEATVAAVVAGFRKALPSAEIYVYDNNSRDRTAAVAREAGAIVRSEGRQGKGHVVRRMFADVEADVYVLVDGDATYDAPSAPRMIDRLLDDHLDMVVGLRIDQVQSAYRFGHRAGNRMLTGFLSSTFGHAFKDILSGYRVFSRRFVKSFPVLSDGFEIETELAVYALELSLPVAELETPYYARPEGSFSKLNTWRDGFRILGTMLKLYRSERPLRFFTAIGILLALASVILAIPIVITFIETGLVPRLPTAVLSMGLMIMALLSASSGLVLDTVTRGRREMKMLAYLSQPAAKSN

SEQ ID NO: 14394 - protein, 184 aa, BradyrhizobiumColbertium
MDRGAFRCYPAIDMNDLSLTILPEAAGDAQAIERLHERTFGPGRFVLSAYRIREHVDHLLELSFTARIATLLVGSVRQLPILIGDTPALLLGPLTVEPPFRGRGVGRLLMERALNDARLKGHRLVLLVGDEPYYGRIGFKQVEKGRVTMPGPVDAARILVFELVDGAFEGVSGRVGPDWSKARR

SEQ ID NO: 14395 - protein, 117 aa, BradyrhizobiumColbertium
MAKHRIYTTSFASVYPLYIAKAEKKGRTKAEVDEIISWLTGYDRSQLEAQLAKRTDFETFFAQAPRANPARTLITGVVCGVRVETVAEPTMREIRYLDKLIDELARGKAMDKILREA

SEQ ID NO: 14396 - protein, 244 aa, BradyrhizobiumColbertium
MEAVTPAKRRLFLFGTLAAVAAPAVFTRRAFAEEKGIGEKLKEAVTGKTGKEVTPPEDLMREHGVLDRVLLVYEAGVRKYASNEDFDPALITRSAEIIRDFINNYHEKTEEKHLFPRFRTAGKMVALVDTLERQHEAGRKLTETIIRLAPTSRSSGADRTRLVDTIQSFITMYRPHAAREDTDLFPKLKDLVSAHEYDAMAEDFEKTEHDLFGEDGFEKMAARVAQLEQQMGIHELNQYTPQGR

SEQ ID NO: 14397 - protein, 39 aa, BradyrhizobiumColbertium
MVDGPCRLPCALLSASKPPCLHQPLESASQLGAIRPGDA

SEQ ID NO: 14398 - protein, 793 aa, BradyrhizobiumColbertium
MSFQLRRAQRLGGASLLLLGAAATPVFAQDPAQDKSSTEIPAVTVTAPSPIVRRAVVPSRNAGRGGTRTARVRSREQAAEPAPAAPVPAAPQQGVLPIVTDQFATVTVVPNEEIRRNGGGTLGDLLFSKPGITGSEIARGASSRPIIRGLDTNRVGIVENGTGSNGASDLGEDHFVPIDPLATNQVEVIRGPATLRYGSTAIGGVVSATNNRIPDALPSCTAPFPTYGLPTKAPLANMGSPGCITAETRTAVTSVDRGVEGAMLLDAGGGNFAVHADAFGRKAGDYNIPSYPFLTDPTLPFNGRQPNSASQGYGGSVGGSYIFDGGYVGAAITQHNALYHIPGIEGSEFLTRIDGRQTKFTTKGEYRPDAAAIDAIRFWAGATDYKHDEVGLADAADLTSLGVRQTFTSKEQEGRVEVQLAPFDVRFAALTTAVGVQASHQKLTAPSPDDPGSPINGLFDPNKNTKVAGYIFNEFKFSEAAKAQIAGRVESARLSGTAPAFVPDVFDLAVDPAAIGPATAVNRNFTPVSGSIGLIHDLPWDLVASITGQYVERAPKPAELFSRGGHDATITFDIGNPNLGIETAKSVEAGLRRAVGPLRFEITGYYTKFNGFIYRRLTGNTCEDGVCQLGAGLELNQAIYSQRDATFRGGEFQFQYDVMPVWNGIWGIEGQYDIVRATFDDGTNVPRIPPQRLGGGVYYRDADWFARINLLHAFAQNDIAPIAETPTPGYNLLRAEVSYRTKLHQSWFGAREMHVGLVGNNLLNENIRNAVSFNKDQVLLPGIGVRAFANFKF

SEQ ID NO: 14399 - protein, 138 aa, BradyrhizobiumColbertium
MKWFRSNIRHGARLALFAMLVQLALTFGHSHWFAQAAPLAQSSLHQAEGGKDSGKSLASIDSVAVQKQSPSGPDRDHHGEDNCGICAIIAMAGAVVSSTPPVLLLPQAIDLLRRTTDAEFIHLRSAGTAFQPRAPPAS

SEQ ID NO: 14400 - protein, 687 aa, BradyrhizobiumColbertium
MNYGIAFTPLVPAIVLWLAFAAIVVIAIVLLAARARGAAVRVAALALILLALANPSFTREDRDPLTSVAAVVVDKSPSQNFGSRNREAAAAQEGLVDSLKKIKGLEVRVVDAGQADGETDGTKLFGALASALSDVPVDRVAGAFLITDGRVHDIPANATALGFQAPVHALVTGQKDERDRRIAITAAPRFGIVGQTQTISYRLDDQGVSGERARVTIRRDGEVINERTLSSGQAASVDVDIKHAGPNIVEIEASPLERELTPVNNRAVVAIDGVRDKLRVLLVSGEPHSGERTWRNLLKSDASVDLVHFTILRPPEKQDGTPINELSLIAFPTRELFQQKINEFQLIIFDRYARQGVLPIAYFDNIARYVRGGGAVLVSAGPDYASNTSIWRTPLDSVLPAEPVGVTEKPFYAHLSDVGKRHPVTRGLEGSGSEPPRWSRFFRTVDTRNAVNPPVMTGVDGKPLLFLSRFGEGRVALLLSDHIWLWARGYEGGGPHLDLLRRTSHWLMKQPDLDEEALRLQVQGKDLVVVRQTMADSVQPVSVTSPSGVSQDLTLSPGDPGEWRASLPANELGLWQATDGTLKALINVGPTNPKEFSEVTSTVDTLRPLAQATGGNAVRVADGSSVELPRILPVRSASVFAGDGWMGVRMRDASVVKGVGVLPIFSGLIGLLLLLGAFAATWVREGR

SEQ ID NO: 14401 - protein, 938 aa, BradyrhizobiumColbertium
MMGLPLAFTQPLLLIGLVSLPVLWWLLRVMPPRPRRIEFPPTRLLFDITPREETPSRTPWWLTALRLLAAALVIFAAAGPIWNPQTGAAGSKAPLMIMFDDGWSAASHWDIRIRTADELIANADNDGRAIALVPLSEPNRDITLMPAGAARVALRQLAPKPYSIDRVETLTAVDRFLKVTGDCEIAWLSDGVDTGRGEDFVQGLGKTIGDRSLTVFEGGTSSPLALVAAENAAAKMTVKVLRTDSGIAVGTVRALDQKAAPIGEARYSFGPQDKETEAAFDLPVELRNDITRLEISGERSAGAVQLLDKRWRRRAIGIVSGSTSETAQPLLAPTFYLTRALAPFADVRLADKGSPQQGITQFLDQKLPMIILADVGTISPELRERLNAWVDQGGILVRFAGPRLAQAEDDLVPVKLRKGGRTLGGSLTWEKPQHLASFAGEGPFAGIAVPKDVTVSRQVLAEPDAVLATRSWASLEDGTPLVTGEHRGKGLVSLFHVSADMRWSDLPMSGTFVEMLRRVVDMSGYTSKPGAGVAGEASAETVAPLHILDGFGAFGPPPATAKPLPADYRDRATPDHPPGFYGPAEGPLAVNTLAAADRIAALNTASLRARHATYTNAEPRDLRGWLLSTALALFLIDAIIVALLGGGLAALLRRRAAPATIVLALALAGLISFAPTAARADSAADEFAMKAVSQTRLAYVVTGNADVDSIVKAGMNGLTLFLAQRTALEAGDPIGIDPARDELAFFPLIYWPIVPGAPKPPQDAINKIDAYMKQGGTVLFDTRDAIEAPPGANGASQTPGMQTLRDILSSLDVPGLEPVPREHVLTKTFYLLRDFPGRFTAGQTWVETLPREDDDEDSAQRPARGGDGVSPIIITSNDLAGAWAVRPDGQAMLPVTGDDPRQREFAYRAGANIVMYTLTGNYKADQVHAPALIERLGQ

SEQ ID NO: 14402 - protein, 315 aa, BradyrhizobiumColbertium
MMAAENGHAAKETLAIRRADGESRTLAASLPRLVLEARRIAANVIHGLHGRRRAGSGENFWQYRRFVSGEPSQNVDWRRSARDDHLYVRELEWEASHTVWIWPDRSPSMAFASRTARESKLERTLIVAFALAELLVAGGERVGIPGLMAPTASRSVIDRMAQAMLHDGADRLSLPPSFVPAALAEIVVLSDFWSPIAEIRTTLAGLSGTGAHGALVQVVDPAEESFPYSGRVEFVEPEGFGVITAGRAESWAQDYTARLALHRDQIRAETNKLDWLFTTHATDRSAAELLLFLHAGMQVSKSGARTTTIKAGPAA

SEQ ID NO: 14403 - protein, 332 aa, BradyrhizobiumColbertium
MAESVEKLEDGIVRSAEQVSSQIRAAKDAIASVIFGQDRVIENTLVTILSGGHALLIGVPGLAKTKLVETLGVTLGLDAKRIQFTPDLMPSDILGAEVLDESTAGKRAFRFISGPVFAQLLMADEINRASPRTQSALLQAMQEQHITVAGARHDLPKPFHVLATQNPLEQEGTYPLPEAQLDRFLMEIDVDYPDRDAERRILFETTGVEETLAKGAMSPDALITAQRLIRRLPVGDSVVEAILSLVRSARPGPDAGEAGKFIAWGPGPRASQSLMLAVRARALIDGRLAPSIDDVLDLAEPVLKHRMALTFQARAEGRTIPDVIRQLKTRIG

SEQ ID NO: 14404 - protein, 203 aa, BradyrhizobiumColbertium
MANQGQSADRGLEGLTAAAKSAADAEGATKGLPPVHLWNPPFCGDLDIRIASDGTWFYLGTPIGRPALVRLFSTILKREGDKHFLVTPVEKVGIRVDDAPFMAVEMQKQDEGDCRVLRFRTNVDDWVTCDAEHRLRFEQARDGGLTPYLHVRADLWAKVTRALYYDLVDMGEERVVDGQPMFGVESAGEFFVMADAEQVRAAL

SEQ ID NO: 14405 - protein, 225 aa, BradyrhizobiumColbertium
MNMNKPILTNEPVAMGAADFFARSKAKLGFDVPPGLYDPNIIPASGDPGTDKMLEIIAREQPVRPAAVLIAVVDHPEPTILLTQRSAHLNDHAGQIAFPGGKIDATDSSPLDAALREAEEEVGLSREFVEPLGYLDLYGTAFGFRILPTVARVRPGFELAINHSEVDDAFEVPLSFLMNPVNHQVHSKEFRGLERSYYAMPFAERYIWGATAGMLRVLYERIYSS

SEQ ID NO: 14406 - protein, 87 aa, BradyrhizobiumColbertium
MIRTILTEIGIFLIPFAVYALFLAAARSGVFARSSWPVTVVARLALVAIVLVIAGLIGLAHFSGAPPDSTYVPAHIENGKLVPGAEK

SEQ ID NO: 14407 - protein, 384 aa, BradyrhizobiumColbertium
MGGAVRNALLGLLPGDIDIATTALPDEVMRRAKAAGIKGVPTGIDHGTVTLVIDGHPYEVTTLRQDTETFGRKAKVAFGRDWVKDAERRDFTMNGLSADAHGVVYDYVGGIADAQARRVRFIGDPDQRIAEDYLRILRFFRIHAAFGAGEPDRDGYLACIRGRAGLANLSAERVRMEMLKLLVAGGAAAAVLAMAEGGLLQPLVGGVAYTSPFAAMIATERALGLAPNSTRRLAALSVAVTEDAKRVAVRLRLSNAETKALDSMGHRWWRLATKDEANARRLLYRLGVERYRDRVLLAWARNGGDVHSPRWRSLAELPQRWTAPKFPLKAADFIARGMTEGPGLGHVLTLAEDAWLAADFPLDEAALASIADQAAARVGRDEKT

SEQ ID NO: 14408 - protein, 318 aa, BradyrhizobiumColbertium
MDTLSSMRVFVRVVELGGFNAAARACAMSAAMVAKHVGHLEERTGARLLDRTTRSVRPTPEGQLYLEKVLAILEAVDEAEGTVGAEKRLARGTLRVTAPVELGQDHLAPLLVDFMSRHPGIAVVADLTNRPVDLVQEGFDMAIRVAPSLDTALIGRKLATTHFRVVASAEFLARHGVPETPEILAALPALTFSQPAPRLDWSWRRREMHGRVRMTARLASTSADTLRKAAVAGLGVSWLPSFVCGKDIEAGLLVPILEDCDWGSLGVHVLYPHRRFSPSRLRLFIDFLAERLGDDPSGDPWAPRMEERRIMLAGSRLA

SEQ ID NO: 14409 - protein, 100 aa, BradyrhizobiumColbertium
MTTLLQFDFAFDGPWGEDLQIACRDLADDIAAQPGLIWKLWGENRDAGRAAGIYLFETPAAAAAYVAKHRPRLAALGVTDPAISSFSLNLPLSRMTRAPF

SEQ ID NO: 14410 - protein, 95 aa, BradyrhizobiumColbertium
MYTTIAEVEIEDLARFLSVFATDGRNKREAHGSLGAEVLFASDGSDRVIVLIDWRDEAACDAFRSDASVPPTMANGGAKGRPRFTPVIRAGRFVA

SEQ ID NO: 14411 - protein, 568 aa, BradyrhizobiumColbertium
MMVRKLTACAIVATGMCFAGVTNAEAQQPDFNAPDLILVNGKVLTLDERSTVTEAVAVADGKILATGTSASMRSLAGARTRVIDVSGKTVIPGLIDTHAHFKAAGLGDYVVGLGRARTVAEALEAIKSFVAKRKPGEWIVGGAWHPPSQLAEKRYLTRQEIDSVAPNNPVYLRTVGHFSMANTMALQLVGVDKSTADPSGGKFERDAAGDFTGLLVESAIDRVEKAVPPWTEADEIRQFTIAQGVLNSFGITSAVEGATEARDIRTLQKLVASGKATLRTGVMFRPEPPADLTAWEAIMAGNGASSGFGNDWLKFAGIKIFYDGGMTLKTALMRDVYPDSHDNYHGIAQQTPERLKQLVSICNRYDWRVGVHVVGDLGIDHVLDAFESADKEKSIRDRRFVLIHASLIRPEQMERAQRLGVRIDFQNAFMWDKAATVERFLGRATADRAVPTRTMIEKMGIDSLGAGTDFPVNPINPFLNMYVMVTRKDPNGNAYGAAEAITREQALRLYSSAASRSTFDEARKGTIEPGKLADIVVLSADYTAVPEDQIKDIKADLTIAGGKVVFQR

SEQ ID NO: 14412 - protein, 43 aa, BradyrhizobiumColbertium
MPREVRTLGVDPNSAATSTLAEQEFGVNQRQRFRSARDRFEVS

SEQ ID NO: 14413 - protein, 286 aa, BradyrhizobiumColbertium
MGKRAKRGKAEPLALPMVARVAIGAVAVAALGYGLLSRPAGVQPMRKPSAPQAMASSTPVYVAAPVRASAPAPAPVAPPAPPAEPPKAADGPEALVRQVVDYASRQPPGTVIIDTKNTFLYFVLNDTQALRYGIGVGREGFTWSGEQTVARKAEWPDWRPPDEMVSRQPYLPRFMAGGPGNPLGARAMYLGETEYRIHGTNKPDTIGKRVSSGCIRLTNEDVVDLYDRVKVGAKVIVLPATASRRPSQGAPSDAASRSPDPASPSNRPSATNAQMLSSGPKIAEVR

SEQ ID NO: 14414 - protein, 67 aa, BradyrhizobiumColbertium
MDLKAGDVVMLKSGGQPLTVAEVKQDEVLCLWMGMEGDLFRETLPLAVLVQVEEDDEEEEDEEEDGD

SEQ ID NO: 14415 - protein, 281 aa, BradyrhizobiumColbertium
MTTMKPASKPLPRAMLIDMDDTILSAYGRPEIAWNTITAEFADELAPLPPPMVATAVLAFARNFWASAEAAWRLRLAEARHLTVKGGFAALAAAGHRALPDDLAVRLADRFTAYREEEMFVFPGAHDAIDRFKALGIRLALVTNGAADMQRAKVERFELAHRFDHIQIEGEHGFGKPEERAYLHAMDALGVSAEDTWMIGDNLEWEVVTPQRLGIYSIWMDVHGDGLPEGSTVKPDRIIRSLGELLPDQAQPDPKQKTENNPMHSSRPPQDQGPTDYTKRL

SEQ ID NO: 14416 - protein, 295 aa, BradyrhizobiumColbertium
MNPNLMDDRKARARAWFERLRDDICASFERLEDDAPEALYPGEAGRFKRTPWQRTDHSGTPGGGGVMSMMHGRLFEKVGVHCSTVHGEFAPEFRAQIPGAAEDPKFWASGISLIAHMRNPNVPAVHMNTRFVVTTKAWFGGGADLTPVLDRRRTQDDPDTISFHAAMKQACAQPNGVADYDKYKKWCDEYFYLPHRKEPRGIGGIFYDWHDSGDWDADLVFTQDVGRAFLKIYPEIVRRNFASAWTAVDREEQLIRRGRYVEFNLLYDRGTIFGLKTGGNVDSILSSMPPEVKWP

SEQ ID NO: 14417 - protein, 224 aa, BradyrhizobiumColbertium
MKAPRPDQEIEERGLSYAVKEIFLTLQGEGAHAGRASVFCRFAGCNLWSGREADRADAVCRFCDTDFVGTDGTLGGRYASASELADTIAGQWRATAANRYVVLTGGEPLLQVDAALIDALHARGFEIGVETNGTIAAPEGLDWICVSPKGGSELVLREGHELKLVYPQPLAAPETFEHLAFERFSLQPMDGPEVAENTARAIEYCLHHPQWRLSVQTHKSLGIR

SEQ ID NO: 14418 - protein, 155 aa, BradyrhizobiumColbertium
MQIALFQPDIAQNTGTILRLCACLGLAAHIIEPAGFPVSDRLFRRAGMDYLDHVSLTRHDSWTKFEEWRAARSYRLLLFTTKAATDYRDFHYQTSDILLFGRESAGVTDAVIEAADARLVIPIKAGLRSLNVAMTAAMAAGEALRQIRNHEGPEA

SEQ ID NO: 14419 - protein, 138 aa, BradyrhizobiumColbertium
MNPDASTIAAGAPIEVDLSPIAEGQDIKVFWRGKPIYISHRTKKQIDEARAVNVASLPDPQADDARVKSGHEQWLVVIGICTHLGCIPIAHEGSYDGFFCPCHGSVYDTSGRIRQGPAPTNLVVPPYQFVSDTKIQIG

SEQ ID NO: 14420 - protein, 690 aa, BradyrhizobiumColbertium
MSGPSDYQPSNPALQWIERRLPIFGLIHSSFVAYPTPRNLNYWWTFGAILSFMLAIQILTGVVLAMHYTPNADLAFKSVELIVRDVNYGWLLRNMHAVGASMFFVAVYVHMFRGLYYGSYKEPREVLWILGVIIYLLMMATGFMGYVLPWGQMSFWGATVITNLFSAVPYVGESIVTLLWGGYAVGNPTLNRFFSLHYLLPFVIAGVVVLHVWALHVAGQNNPDGVEPKTEKDTVPFTPHATIKDMFGVACFMLLYAWFIFYMPNYLGDADNYIPANPGVTPPHIVPEWYYLPFYAILRSIPDKLAGVIAMFGAIIILCFLPWLDSAKTKSSKYRPLAKQFFWIFVAVCILLGYLGAQPPEGIYVIAGRILTFCYFAYFLIVLPLLARIEKPRPVPNSISDAVLAKTGSRSTPMVSTAIVLALAGSLFAGSVDSAKASEGGDKPPGNKWSFAGPFGTFDRGALQRGLKVYKEVCASCHGLSYVAFRNLAEPGGPGYSVAQAAAFASEYKVKDGPNDAGDMFERAGRAADYFPSPFPNEQAARAANGGAAPPDLSLITKARSYKRGFPWFIFDAFTQYQEQGPDYVAALLQGYEDKVPEGVTIPEGSYYNKYFPGHAIKMPKPISDGQVTYDDGSPTTVAQYAKDVTTFLMWTAEPHMEARKRLGFQVFAFLIIFVGLMYFTKKKVWASSH

SEQ ID NO: 14421 - protein, 229 aa, BradyrhizobiumColbertium
MGTAITFKRPDGQDASGYLANAARGNSPGVVVIQEWWGLSDQIKGLCDRFALAGFDALAPDLYKGKVVPYHDTDSANKEMNSLDFMDATTQTVRGAAQYLSRNGAKVGLTGFCLGGAVTIIGATKIPELAAGVVFYGIPPEQAARPADVKIPLQAHFANKDDWCTPELVNGFEKAMKAAGKSLELFRYDAEHAFVNEQRQAVHDREAAELAWGRAIKFFANHLDGNRAA

SEQ ID NO: 14422 - protein, 705 aa, BradyrhizobiumColbertium
MTRAGLAITRVAEQFTGGANRLDDLVSLLDRRRGVVLSSGTTVPGRYESFDLGFSDPPLKLETVGFDFKLEALNERGQVLIAFLADVLREPCVVISEKTATRLAGHIIRGDAPVEEDQRTRRASVMSLVRDIIAAFSANDDALLGLFGAFAYDLVFQIEDLVQKRPREADQRDIVLYVPDRLLAYDRATGRGVVLAYDFAWKDRSTQGLPRETADSPYLKTPRQGFADHGPGEYQATVETARAAFARGDLFEAVPGQLFAEPCDRSPAEVFQRLCVINPSPYGALMNLGEGEFLVSASPEMFVRSDGRRVETCPISGTIARGSDAIGDAEQIRQLLNSEKDEFELNMCTDVDRNDKARVCVPGTIKVLARRQIETYSKLFHTVDHVEGMLRPGFDALDAFLTHAWAVTVTGAPKLWAMQFVEDHERSPRRWYAGAIGAVNFDGSINTGLTIRTIRMKDGLAEVRVGATCLFDSDPAAEDRECQVKAAALFQALRGDPPKPLSTFAPDATGSGKQVLLIDHDDSFVHMLADYFRQVGASVTVVRYVHALDMLKRKNWDLLVLSPGPGRPEDFAIKKTIDAALEKKLPVFGVCLGVQAIGEYFGGELGQLTHPAHGRPSRVQVRGGRLMRNLPNEIVIGRYHSLFVERGSMPEVLDVTASTEDGVAMALEHKTLPVAGVQFHPESLMSLGNEVGLRIVENAFRLDAR

SEQ ID NO: 14423 - protein, 179 aa, BradyrhizobiumColbertium
MTFDHDLKASIRTIPDYPKPGIMFRDITTLLADARAFRRAVDELVNPWAGNKIDKVAGIEARGFILGGAVAHQLSGGFVPIRKKGKLPHTTVRIAYSLEYGIDEMEMHVDAIQPGERVILVDDLIATGGTAEGAVKLLRQIGANVVAACFIIDLPDLGGAAKLRAMDVPVRTLMTFEGH

SEQ ID NO: 14424 - protein, 110 aa, BradyrhizobiumColbertium
MSIDRKAAIAAYKERKTVAGIFVVRCPASSETWVGQAPNLETIQNRIWFSLRQGSHTCRSLQTAWNTHGEAGLTFGECERLEDEESAYVRNALLKERMLHWRAELKAEMI

SEQ ID NO: 14425 - protein, 222 aa, BradyrhizobiumColbertium
MPATPVYIICSPRPQVGKTLLARLLVEFLLLKNGNVAAFDVNLKEPSLLDYLPKVTETADVIDTFGKMQLMDRVILDDGVAKVIDLGFHAFDEFFKMTEEIGLLKEAARRHVAPQILFVADTDRASARAHGMLREQIPRMNLITVDNEYVVRGELPPAMASGRLFRLPALPGFLKTYIDRLNFSFTGYLRQEKDSSTELHQWIRRNYLAFRELELSLILQRS

SEQ ID NO: 14426 - protein, 250 aa, BradyrhizobiumColbertium
MAKPAVVVVGADKGGVGKTTVSRTLLDYFSANNVPTRAFDTESPRGTLKRFHPDITEIVDMTTTADQMKIFDTLNAVSPSVTVIDVRAGLLSPALASLRDIGFLDAAKAGQITFAVFHILGPSIASLEEIAETAGFMTGAKYFLVKNFINDTQFFQWDQATYNSYFHRIKDATELTIPKLNEMAYEQVEVSSVPFLKFVANKGINDEAANYSFVLRGYVRHWLANVWSEFDRIRLTDIVGSKPVSRNSEK

SEQ ID NO: 14427 - protein, 402 aa, BradyrhizobiumColbertium
MAAYGLYTHIASNKFRSMLLLAGLFALVYVLVYAGALVAEVVINGNGTVAYYLSRAFSDLLKAAPFATIAAIAWIAIAYFFHQSMIDAVTGGHGVTRQEEPRLYNLLENLCISRGITMPKLKIMESPALNAFATGLNPRQYSITVTTGLLDALDDKEIEAVLGHELTHIKNGDVQLMVVAVIIAGVVGFFGELFFRLFTNFSWSSGSGGSWSSGSSSRSSSSSSDSKSSGGGAVIVIIVAIVLIVVAWLLSQVVKLALSRSREYLADAGSVELTKDPDAMISALRKIENRGELPGATSAVMELCVDNPREGFADLFATHPSVQSRVDALVKFAGGHDPGPLPDPTEEMNQPEAEQPEEDAPPALPHGPWSDAGSPAGPLPPVSAPSPSGAPAGNPMGPWGHH

SEQ ID NO: 14428 - protein, 186 aa, BradyrhizobiumColbertium
MSTGWIVLGVLVVLALFAFSAYNRLVALSQRVGQAFADIDVQLKQRHDLIPNLVETVKGYASHERGTLDDVIKARNSAMSAQGPAQVSAAENQLSGALGRLIALSEAYPDLKANANFQQLASELSDLENKIAASRRFFNNAVQEYNTGIQQLPAALFAGMFGFTKKDFFDLGASRTEVETVPQVKF

SEQ ID NO: 14429 - protein, 327 aa, BradyrhizobiumColbertium
MSMIAPALPAELKAALDRKLEGFSRSDAAQRSQKISTTYRAGGGSGTIKSEADALAYALARMPATYAAVAASLNALAEIVLDLAPETLLDVGAGPGTASWAAAEAFPSLHDFTLLDANATLSRLGLDLARDSSRLAECRYVPGDASGNLAEVSQADLVIASYVMGELSEADQRKLTDAMWAKARHALVVIEPGTPAGYARLLALRQQLIAAGAHVAAPCPHERPCPLNAPDWCHFSQRLPRSQAHRQIKGADVPFEDERFIYVALIRTPPASRAARVLAPPDVGKAGIAAKLCTETGVELAKVPRRDKAAYASARRWRWGDAVIAES

SEQ ID NO: 14430 - protein, 1154 aa, BradyrhizobiumColbertium
MKITRLRLHGFKSFVEPTDFVIEPGLTGVVGPNGCGKSNLVEALRWAMGETSYKSLRAADMDAVIFAGSGNRPARNHAEVTMTIDNADRTAPAAVNDSQILEISRRIEREAGSVYRINGRDVRARDVQILFADAATGARSPALVHQGKIGEIIQAKPEQRRRVLEDAAGVAGLHARRHEAELRLKAAETNLTRVEDVIGQLSGQMEGLKKQARQAVRYREVAAKVRKAEATLYHLRWIGAHADVNESAQTHDLAVREMAERTQHQAEAARIQAIRAAEMPALRDAEARAAAGLQRLTNAREQLDREEERAKERVAELERRLAQFEGDISRAQQQTMDADVALQRLDTEDAELKEEIKSRVEKRSGVDERVAEAEAVLTETEQQFAELTTALADLTAKRNQLEANVRTHRDKLARLDQEIANVAAEEQKLAEATGGFGDLDELTALVETAEETLAASEAAAQASEAAHVAARQTLESSRSPLVEADKRVQRLETEARTISKIVNGETKNLWPPIIDGITVDKGFEKAIGAALGDDLDAPIDPSAPMRWTNVGHTEGDPELPEGAVPLANHVQAPAELARRLAQIGVVPRERGAELVSQLKTGQRLVSPEGDVWRWDGFVAAAHAPTGAARRLAERARLVDIENELEQARIDAQIKRQALENAESELQMAASTEGASREAWRAAQRELNVARERHANAEREISRHAARKATLSEAHSRLAADRAEAEAAYEYAQAGIGELPSSEDTETRLAAVRSDIEGHRRMAAQVRAEAQALAREAELADRRVQAILAERTEWQNRKESAASHIDTIQARIAELTIERSELENAPAVFAEKRSALITEIEYAENDRRMAADALATAESAMAETDRVAKLTLEALSSAREATARAEERMEGARRRLEDIEREIRDMLEVEPQAVAGLAEIEPGAELPPLHDIEEDLEKMRRDRERLGAVNLRAEEELREVETQHNGLVTERDDLVEAIKRLRQGIQSLNKEARERLLTSFEVVNNHFKRLFVELFGGGEAALHLIESDDPLEAGLEIIAKPPGKKPQTLSLLSGGEQALTAMALIFAVFLTNPSPICVLDEVDAPLDDHNVERYCNLLHEMTGSTDTRFIIITHNPITMARMNRLFGVTMAERGVSQLVSVSLAEAVDILDQNVA

SEQ ID NO: 14431 - protein, 218 aa, BradyrhizobiumColbertium
MIIPRRAFTTMLSLTGLAAFAGLSPLRLISEAMAQSAADVAKPVSLPDMALGPNDAAVTITEYASMTCPHCATFNEQVFPKIKKEYIDTGKVRYIFREFPLDIKAAAGSMLSRCIANGDAPKYFEVTDMLFRQQNDWVMKNTTETLTRIGKQAGLTQQQVEACLKDQALLDKIAADQKYASDVLKVDSTPTFFINGEKIKGETSFEEFAKRINPLLKS

SEQ ID NO: 14432 - protein, 163 aa, BradyrhizobiumColbertium
MSKFPAKPGPISAKPLGTLLDDVFAEAYAKQGFAARELVTRWAQIAGPEIAAHAEPLKMQWPRPVEGQPQEPATLVLRVEGPMALEIQHSADVILQRVNRFFGWSAVGKLAFRQAPLSRPQARKRPGPPDPKAVAKAAENLTDIEDDDLKTALARLGAAIKRN

SEQ ID NO: 14433 - protein, 372 aa, BradyrhizobiumColbertium
MHLKSARKAKSEPVPSKRSARPVALLQWYDRHRRRLPWRAAPGETSDPYRVWLSEIMLQQTTVKAVGPYFEKFVARWPDVTALGRASLDDVLRMWAGLGYYSRARNLHACAVSVTREHGGSFPDTEEALRALPGIGPYTAAAIAAIAFDRRTMPVDGNIERVVSRLFAVEEELPQAKPLIQRLAATLLADSRAGDSAQALMDLGASICTPKKPACSLCPLNEDCTARAQGTQETFPRKAPKKSGALRRGAAFVVTRGNELLVRSRPEKGLLGGMTEVPGSDWIAGQDDAAAKLQAPELKGLSRWQRKVGVVTHVFTHFPLELVVYTAKAEARARAPAGMRWVPIATLAGEALPNVMRKVIAHGLELSRDPSS

SEQ ID NO: 14434 - protein, 140 aa, BradyrhizobiumColbertium
MVKTALDNFPRPPCAELLGWRLLDARPQEGWIKLGFEGKPQFCNPAGFIQGGMLSAMLDDTMGPAVLVLSEGRLYTTTISMTVNFLSPAKPGPIVGEAKVTQLGKTIAFVEGKLMAEDGTVLATASASERLLEAARVVGK

SEQ ID NO: 14435 - protein, 426 aa, BradyrhizobiumColbertium
MTVLIAGGGIGGLTLALSLHQIGIPVKVFESVAELKPLGVGINVLPHAVRELIELGLMDKLDANGVRTSELAYFSKHGKPIWREPRGLEAGYKWPQFSIHRGILQQILLDTAVERLGRENILTSHHLTGWTETAGGVRAEFVDKATGKAAGIYDGAILIAADGIHSAVREKLYPGEGPPIWNGRILWRGVTPAKAFLSGRTMIMAGHEILKFVCYPISKSPDAAGNYQINWVAERHMPPTYQWRREDYNRTARLEEFLPWFEGWTFDWLDVPGLIRNCPRAYEYPLVDRDPVSQWTFGRVTLMGDAAHPMYPIGSNGASQAILDARVITREILAHGPTQAALLAYEAERRPATTDLVLLNRKNGPEQVMQLVEERAPDGFAVVTDVLSQQELEDIAANYKRVAGFQVEALNAKPPIVSKDTKRVVA

SEQ ID NO: 14436 - protein, 206 aa, BradyrhizobiumColbertium
MLKLYYATGTCALATYISLEEAGADYTAERLSFKDNQQNSPDYLAINPKGRVPALVTDRGVLTETPAMLAYIAQMFPKAKLAPLDDPFDFAEVQSFNSYLCSTVHINHAHKMRGARWATQESSFADMKEMVPKTMAACFNLIEQKMFKGPWVMGDQFTVCDPYLYTLSNWLEGDSVDINATPKIADHFKRMSDRPAVSKVMAAQKA

SEQ ID NO: 14437 - protein, 336 aa, BradyrhizobiumColbertium
MAASPCGDIAKNIAARPAFFKSIEDMICIHFMNLNSLDLNLLTALDALLREANVSRAALRLGLSQPAASHALQRLRDIFGDPLLVRTGARMELTPRGLALRVPLAQTLDQVRGLFVPDEFDAARSERHFRLMMPDLAVELLMPPLMAKVTRAAPNVRIDVVPWRGPAIFHAEFARTIDLVISIGNAFKGFHRQLLYTDSDALAVRRGHPVAGKLKQREAFLAARHVGVIIRGNSEDLIDTWLRAKNVERHIALVVSGYLEALHVAARTDLVAFVPRRLIAALSKQLGLTTVTPPLDPGIDEQFMFYPTRAQMDPGSIWLRRLMLETGRELGKQRAS

SEQ ID NO: 14438 - protein, 147 aa, BradyrhizobiumColbertium
MNAAANKKLMQDIFAAAADPDPAARDRALFTASLAEDAKWIVTGQYSWSRTFSGKEAILKDLHGYVRTRLRDRTRTVAHRFIADGDIVVVEAKGDNVTPEGVRYDNDYCLVFRLEDGRIKEIREYCDSILTEQALGPFPQSSMGAAR

SEQ ID NO: 14439 - protein, 49 aa, BradyrhizobiumColbertium
MNFPKTQIAAGDARPETKKRRRNAKVPPVLACEQARDPGSGALFPSNAF

SEQ ID NO: 14440 - protein, 183 aa, BradyrhizobiumColbertium
MGHSFSGLRERLREATSAAHRDLDAQLSGFDLTSPAGYRLFLQASAAALLPLEAALVAAGVERIFPDWLERSRSAAIVADLWCLGSSVPRTVPVPPLTRSGVLGTMYVLEGSRLGAKFLLKSVTDAADPRLSGATGYLGHGAGKRLWQSFLTKLATEEPRDGDEVIVAARTAFAAFERAAERA

SEQ ID NO: 14441 - protein, 848 aa, BradyrhizobiumColbertium
MNEAVNLTNCDREPIHIPGSVQPFGFLLAVLSDFTICMASENVGSFLGGDVAGLIQRPLSTVISEAAVENIRGRVDHLSGPDATERLFGIELQAGKPLYDLSIHFSGVYLIIEAEPSVHETGVNSGELVRLMLERIRKTRGMTDLAREAARQLKVLTGFDRVMVYQFHPDGSGEVIAETAEAGLESFLGLRYPASDIPRQARALYQRNWLRIIADINAGPATLMSTATHNAGLLDLSMSVLRSVSPIHIEYLRNMGVAASMSVSILRDGKLWGLFACHHYSPRYISFDKRTASELFGQMFSWIVEGRERESDVAYEARAHQVQERLIEIAASHEHSRRAIVDFLGDYRRMVDSDGVAVWSDNNIALQGETPTEDEVKDLVAFVNRTSPGRIFATAEIAKVYAAGQAFRDRAAGFLAIPISRTPRDCLIFFRREVTRSVKWAGDPNKVYDEGPNGPRLTPRKSFELWQETVAGQSKPWSAADIRIAESLRVTLLEVILQLSDLAARERRGAQERQELMIAELNHRVRNILSLVRALVAQSKDTATSVEEFASVLGGRIQALARAHDQITNLNWAPVALRTLVESEAGAYLGARAERVKMGGPDVALDPKAFATLALVVHEMMTNSAKYGALADSTGSVEVVWRLDPSSSLVIEWKESGGPPVQPPSRRGFGTTIIERSVPFDLKGDAEIRFDLLGVQAKFVIPPNFVELVPSIAGAAMRVEEQQSARPRISDTALIVEDNLIIAMAAEVILLDLGARHVDTAASVDQALRSIERSRPSFALLDLNLGSESSIKVAHKLKEIGVPFIFATGYGERAPIPEQLASAPVVQKPYTLEVVENALGKLQQANAQ

SEQ ID NO: 14442 - protein, 669 aa, BradyrhizobiumColbertium
MPKLRLRIRGRLYAGFMALVVVGLVMAVVAVWNLQGVQDQVARQSALSDSTARVLEISAHLQAIQRANLRYVYDASEPAMKEAQERETAATELLRVSAKGALSEERRALYNGLIDDIAKMRRLRDNLGDAVNETRTGKARLLPSGEELAAKTGKLVDVARAAVDEDTAALVADLESRILLVRIANWRFLALRDTKGPATFRASVDRAAQRLAALEKSPQAVELRAALAPVKTSLGIYKSAFEATSAAMLQADEIYHKSLAPLIADSIGKLKVAETTLKKDYQESRTNADAVIAGTTTVQEIAGGLAILFGGIVAFLIARSIVGPLTSMTQAMGRLAGGNLEVEIPGRGRADEIGDMAKAIQVFKDNMIDTERMRAEQAELEAGQAENRKKDMARLADQFEQAVGEIVNTVSSASSELEASAGTLTTTAARAQDLSTEVASASQEASANVQAVASATEELSSSVSEIARQVQESARIATEAVGQASRTNERVGALSKAAARIGDVVELISTIAGQTNLLALNATIEAARAGEAGRGFAVVASEVKALAEQTAKATGEIAQQISGIQAATEESVGSIREISVTIERLSEISSAVAAAVEQQGAATQEISRNVQQAADGTQRVSSNIGDVQRGASETGSASSQVLSAARSLSADSNRLKQEVAKFLNSVHAA

SEQ ID NO: 14443 - protein, 226 aa, BradyrhizobiumColbertium
MLKFYFNGSPNPTKVALFLEEAGLPYQPVKVDTRKGEQFAPDYLKINPNGKVPAIDDNGTIVFDSNAILLYLAEKTGKFLPSNRAELLSWLMFVATGVGPYSGQAVHFKHFAPKDQNHDYAHNRYQYETDRHYKILDDHLKGRRYMVGEDYSIVDMALWGWARMVPFKLGDDAFARYPNVKRLVDEISARPAAARAVALKDKFTFKAEMDDEARANMFKHLTTKVA

SEQ ID NO: 14444 - protein, 344 aa, BradyrhizobiumColbertium
MSKLQAGSVDLVFADPPYNLQLKGDLKRPDESHVDAVNDDWDKFDSFAAYDDFTRAWLLAARRAMKPSATIWVIGSYHNIFRVGAIMQDLGFWLLNDIVWRKTNPMPNFRGRRFTNAHETMIWAARDEKAKGYTFNYEALKAANEDVQARSDWLIPLCTGEERLKGADGKKVHPTQKPEGLLARVLLSSSKPGDLVIDPFNGTGTTGAVAKRLGRSYIGFERDKTYAKAAEARIAKVEPLPEESLAPFMTAREAPRVAFSELIERGMIMPGTKLFDAKKKLGALVRADGAIMLGDKVGSIHRIGAVAQGAQACNGWTFWHVETKKGLRLIDELRAEIRAGMGAE

SEQ ID NO: 14445 - protein, 313 aa, BradyrhizobiumColbertium
MRYDDFRRSDDIEDRRDEGGGFGGGGGGGFGLPMGGGGLGIGTIIILGLVGYAFGIDPRILIGGAEILTGGGHAPSYQTDRQASSGKRGAPTDEMGSMISGILGELDDRWSEIFKANGQSYTGPKIVLFRNATNGGRCGMAQSAMGPFYCPPDRTIFLDTAFFREVETRFRGCSGKSACNFTTAYIIAHEVGHHIQNLLGIIPRVTRLQQQVGSKAEANALQVKVELQADCLSGVWVNREAKKRPNFLEPGDIEAALTTASAIGDDTLQRQATGRVVPDSFTHGSAAQRKQWFMTGYQQGTVQACNTFGPGAL

SEQ ID NO: 14446 - protein, 187 aa, BradyrhizobiumColbertium
MASIDATKQFIPLNIAVLTVSDTRALADDKSGQTLVDRLTAAGHHLAAREIVTDDVEAIRAVIRRWIADGGIDVVITTGGTGFTGRDVTPEAIEPLFEKRMDGFSIAFHMLSHAKIGTSTIQSRATAGVAGATYIFCLPGSPGACRDGWDGILAAQLDYRTRPCNFVEIMPRLDEHLRRPKAQGATV

SEQ ID NO: 14447 - protein, 317 aa, BradyrhizobiumColbertium
MTSQLSDPAAEQVANAQIAAVRAFNRFYTRKLGVLDQHLGKSPFSLSEARVLYELAQREELAAKEIGNELGLDPGYLSRIVQGFDEKGLISRKPLATDRRQYQLSLTAKGRQAFAKLNLNSQNEVAAMLARVSPGDATRLTQAMATIEDVLEQRQSRPAAFMLRSHRVGDMGWVISRQAIAYAEDYNWDISYEALVAEICAQFIKNYDAAREHCWIAEAGGEPIGSIFLVKATDETAKLRLLQVEKKARGLGVGRALVEQCIQGARERGYNKMTLWTQSVLVAARGIYQSAGFKLVASEPHHSFGQDLIGETWEMDL

SEQ ID NO: 14448 - protein, 188 aa, BradyrhizobiumColbertium
MLSVIIPTDGVEQTAVATLAALVPGAAAGVIREVLLVDGARNGVIERVADVAGCRFIGYEGSSQGAALAAGALQARSPWLMFLPAGAVLETGWIEETTQFIQAVATSGRDRAAVFRYARSPYADTAMRDILWGVLRKLVGPLGDQGLLIARDHYDRIGGYPPPPAIPRHGCSGGSAGRPGPCCAAGSS

SEQ ID NO: 14449 - protein, 279 aa, BradyrhizobiumColbertium
MNADQLAAGTAPTSPKEAAPTLRIRALMLGDRINASGLEIGTLVSSTPAAFRVHGGLAVIFRYGVVVLIGLLPSEEKVLIDNLKPRVTGELSPYEEEIAQAQLCNDEAAEAIQPGGPICLAKFSDDRLLLVADALAKSTSLARDERRVAAVFDVIEPFARELAEHGRTPQRRKGILQLIGNALLVQQRVAGRVAIAEKPDVLWEKPELDRLYSRLEDEYELKERLDTLERKLSAVSETANALTDIIDTQRSLRLEIAVVVLILIEVAMGTFQLLTGRGH

SEQ ID NO: 14450 - protein, 535 aa, BradyrhizobiumColbertium
MHIVRIGADAAELRPAEEIGAKAANLARMAALGLPVPPAFVLPVKLCAEIIAGQAHATRHLRDGLKEGISFLESATGKRFGDRRRPLLVSVRSGAARSMPGMLDTVLNVGCTVDAVHGLIRATGRPRLAWDCRRRFLESFGETVLELDQASFAACISELVAAEHVDSDRELDSEALERLASREQALVEDRADGLLDDAFTQLEAAAQAVYRSWMSERALTYRSLQHLEALEGTAVTVQAMVFGNGGLASGAGVAFSRDPSTGAPRPMIDLVLDAQGEDVVSGRRAPDAAEAIKRELPKLESELGDILRRLEHAFVDVQDVEFTVENGRLWILQTRAAKRTPRAAVRIAIDLVHEGLISKAEALQRIAGIDLASLTETRLVAPGRPATTGIGASGGIGTGRAAFSSECAQRLSAGGEPVILLRPDTSTADVAGFALAAGIVTSVGARTSHAALVARQMGKPCVVGCRDLKIDPIAKRAQLGNLSLAEGEWITIEGDAGELYLGRCETIRTRPEAALAEIAAWQAQAGQHDRRAATP

SEQ ID NO: 14451 - protein, 642 aa, BradyrhizobiumColbertium
MKTHIIEELGQGGILLPALVAEGLAANDRIKVRMSALQAAALHAQEPGRPANDLGVESQTAGIAPAAIAALIGGAHLIGQGRLAAPDLAKMMQEIADDAAAMIRAVSAGAASEGERAQARLEAIRAAGLLHASGEIELSRIARLTGVGDAGGDSLHRLVMDLHKQLNRLAASCSEEALDGAHVFGLHSEDRPAVAAFMKGLNATRGLKFDHPGLDTMATRAGGRLLIQNDIGTTDAHVVVIAVKKNAVTVTYTDVHLARAKFFISLFDAFEATWSGLDRHTAAGLGDDNSFYLVTGQYQPDHAADRNEFLAALGAALVFLIDWNKARKLLRTWVAKDDAARILEWAARQRIGHRGFLELGGNDLLGSAVRNAAPTRIGFGERLDQALGRTAAIDFLKASLRASTEALLAGRSVRTVRDQIEADLMRHLDRVDGALLAAVLRQIGLAHDLVAAISRHIAALQAGQPADGKLLTQRCGMIEQKADRIAIESRNEVDRLNARPLIGQLIDRVEEAVDELEQAAFIASLMPETTDPALLASLVELCAVAATATDVAASGVAAAIDVPEGRRADSEDALSAVTRLIDAEHAADSRERATTALVFCGGFDVATSLSVIELARAVERATDRFAAFGHLLRRHIMIDLAA

SEQ ID NO: 14452 - protein, 396 aa, BradyrhizobiumColbertium
MSDTVLVLNSGSSSIKFGLFDVSGTEPALLCKGLLDEHDAKPRLVVKGPADEDLFETRREVSDADGGHLFAEVLAFIEDRFGKRSLRAVGHRIVHGGPDYSGPLILTDGITAKLEGLTPLAPLHQPRCLAPVRTLGAIRPGLTQIACFDTAFHHGLAPPARRFAIPRRFEARGVRRYGFHGLSFEYVAGRLAEIAPELFAKRTVIAHLGNGASLCALRDGRSVDTTMGLTPLDGLVMGTRCGTIDPGVLLYLQQHENMSVEEIQRLLYHESGLFGVSGISADMRTLLASGEVAARDAVDLFTFRAAQQVAMMATTLGGLDCLVFTGGIGEHAREIRGAISERLAWMGVRIDVAANDAARERIDGSGSNVDVFVIPTNEEMTIARHCAALIRERRVT

SEQ ID NO: 14453 - protein, 804 aa, BradyrhizobiumColbertium
MTIQRKAAAATGDLDLLDRYWRAANYLSVGQIYLLDNPLLREPLRPEHIKPRLLGHWGTTPGLNFIYAHLNRVICALDLNVIYVCGPGHGGPGMVANTYLEGSYSEIYPDVARDADGMRKLFRQFSFPGGIPSHAAPETPGSIHEGGELGYALVHAYGAAFDNPDLIVACVVGDGEAETGPLAASWHSNKFLSPAHDGAVLPILHLNGYKIANPTVLGRMPDSEIRDLFRGFGHEPLFVEGDDPKLMHQAMADALDVAFVSIRSIQQHARDGRRSVERPRWPMIVLRSPKGWTGPKEVDGKKVEGFWRAHQVPVSACRENPAHLKILEDWMRSYQPEELFDASGALIPELQALAPEGVRRMGANPHANGGLLKKELKLPDFRSFAVDVPQPGEVIAEATRELGKFLCEVIRLNAKERNFRIMGPDETASNRLDAVFEATERVWMEPTEPYDVHLAQDGRVMEVLSEHLCQGWLEGYLLTGRHGFFSCYEAFIHIVDSMFNQHAKWLKVTRDLPWRRPIASLNYLLTSHVWRQDHNGFSHQDPGFVDLVANKKADIVRIYFPPDANTLLWIADHCLRTYNRINVIVAGKQPAPQWLSMQDAATHCAAGIGIWGWAGTEDGQGEPDVVMACAGDVPTLETLAAVDLLRKALPDLKIRVVNVVDLMTLQPREQHPHGLSDRDFDGLFTREKPVIFAYHGYPYLIHRLTYSRTNHAGMHVRGFAEEGTTTTPFDMVVLNELDRYHLAIEAIERVPGLATKAARVKQQFRDKLIEHSRYVREHGEDMPEIRDWVWQNSAGGNTPAEAGD

SEQ ID NO: 14454 - protein, 394 aa, BradyrhizobiumColbertium
MACYLGFMSPASSHALKHPPVTAPSEPAGAPSDFPELGVAIDRVRRRGRGAQSNVSGRYEPEARVAFDDGWQSLEQLPPFKTTVAIDTSRKVITRNDSPDIGFDRSINPYRGCEHGCVYCFARPTHAYLGLSPGLDFESKLFAKPEAPALLEKELAASGYEPRMIAIGTNTDPYQPIERERKIMRGILEVLERAGHPVGIVTKSALVVRDIDILARMAKRNLAKVAISVTSLDPKLARTMEPRASTPSKRLEALKQLSEAGIPTTVMVAPVIPALNDSEIERILDAAAHAGVKEAAYVLLRLPLEVRDLFREWLMANYPDRYRHVFTLIRDMRGGRDYDAKWGERMKGTGPMAWTIGRRFEIACERLGLNKRRSKLTTDHFARPKRNGDQLSLF

SEQ ID NO: 14455 - protein, 151 aa, BradyrhizobiumColbertium
MVKELAVPVPRLTVITLGVSDIRASIAFYDALGFSRRLKVTGEAVAFYDTGGAVLALYPWDQLAADATLPDQPRPAAFRGVTLAWNCRTREEVDAVLAFALRKGASLLKAAHETHYGGYSGYFADPDAHAWEVVVAPGIEVGDDRRVHLAE

SEQ ID NO: 14456 - protein, 290 aa, BradyrhizobiumColbertium
MIRDKSARNPAKDAPKKEAAGKVAPAKAAKTPAAKTSTGKAPKLAVGKRGIIAIAPPSFRRERALIKRGIWPVAGCDEAGRGPLAGPVVAAAVIIDPDRIPRGIDDSKRLTAGEREKLFDKICASAQVSVAVASPARIDRDNILRASLWALKRAVVALPEPPRHVFVDGRDRLDTECDCEAVIGGDGIVLSIAAASIIAKVTRDRLMCALAQDCPGYGFEQHKGYAVPEHLDALDRLGPSIHHRSFFAPVAAARAKHMPWTVEPVQDLFSVVDAEVQVEASVEIDAAASL

SEQ ID NO: 14457 - protein, 502 aa, BradyrhizobiumColbertium
MRFTSLVIELIRARPRLIVWIAVLLQAAMWLFVALVFYRSPPGNLATLLAFGREYQVGTDLGPPLPVWLADIAYRAAGGHMFGVYVLAQLCEIAAFIALYHLSRAVVGSQQAVLAVLLTMTVLAFSSPALDFGPLVLARPLWALLLLHSWQIIGQRRGNAWFAWSIEAGLLLLTTPAAIFLLLLIVVFALSTAGGRRTLRGLDPLFALIVVAVLALPYAVWLVRAETLTMPALPQVSELKARALHAAWLLGGLALGAAAIPALTFLNTGLFAGKGEEPPIIYRPPVEPLARSFVFYFALATPLGAVLISSLLGIDAVVGGPGVVLIMSGLAVVVTAGDLIAMRRTRMLRTVWTAAVVAPAAGMVLAVLFLPWTGANEIATSMPARAISDFFDESFARRTNHRLRAVAGETQLASLIALHSGRPHLFIDADPARTPWMNQTKFSETGGVVVWRASDTAGTPPPDILKRFPDIVPEVPRAFEWLVTGRQQLLRIGWAIVRPKGT

SEQ ID NO: 14458 - protein, 271 aa, BradyrhizobiumColbertium
MIPEPAPTVRELLAFYLEAGVDCALAEEPIDRLAELDVPPPAPRAAPPVEAPRPVVAPAVMRGEAAPAPDVAIASAREAARTAPTLEALRELMQGFEGCALKHTATRLVFADGNPQARIMFVGEAPGRDEDIEGLPFVGRSGKLLDLMIGAIGLNRTTAYIANVIPWRPPGNRTPTPQETQICLPFIKRHIELVNPDVLVTLGNPSTQTLLGTREGIMRTRGRWFDYDTGGRTIRALPTFHPAYLLRSPSYKRLAWQDLRAIAKVLAQGAV

SEQ ID NO: 14459 - protein, 553 aa, BradyrhizobiumColbertium
MSIEELPPRESMEFDVVIVGAGPSGLSAAIRLKQLNADLNVVVVEKGSEVGAHILSGAVIDPAGLDKLIPDWREDSDCPLKTEVKDDRFYWMTAGGAIKLPNFMMPPLMNNHHCYIGSLGNVCRWLARRAEALGVEIYPGFAAAEVLYDEEGKVKGIATGDMGVGRDGKPKDSFTRGMELLGKYTLFAEGARGSLTKQLINKFALDAKSEPPKFGIGLKEVWQIDPAKHQKGMIQHSFGWPLDMKTGGGSFLYHYDDNLVAVGFVVHLNYDDPYLSPFDEFQRFKTHPSIRGTFEGAKRLAYGARAITEGGYQSVPKLSFPGGALIGCAAGFVNVPRIKGVHNAMGTGMLAAEHVASALAAERANDEVVEYENAWRSSSVGKDLFLVRNVKPLWSKFGTVLGVALGGFDMWCNTLFGASLFGTQSHLKHDRATLDPAKQHAPKNYPKPDGKITFDKLSSVFLSNTNHEEDQPVHLKVADMNLQKTSEHDVYAGPSNRYCPAGVYEWIEEGSGPRFQINAQNCVHCKTCDVKDPNGNITWVPPEGGGGPNYEAM

SEQ ID NO: 14460 - protein, 598 aa, BradyrhizobiumColbertium
MFSNRFNRWTVAAIALMGTAIATLPGAGLAQTPDHPENTAAQFPTRNDLKSLTGAGSYLAARHASVERDAASAAAFYRSALRTDPKNNELLDRAFISSVADGDIEEAVKLAERILTIDRTNRVARLVVGVHDLKLKKYAAAQTNINQSIRGPITDLVATLLSGWAAYGAGDAKGGVATIDKLAGPEWYPLFKDLHAGMILELSGKEKDAGTRFERAYKLDDSMLRVTEAYARWLSRHKESAAATAVYQAFDKKLARHPLIQEGLRETKAGKKMPPLVDSAQAGAAEALYGIGATLTRRGGEDLALVYLQLSLYLQPTHPLALLSLADLYESVKRPKMAIKVYERVPATSPLKRNAQIQLAIDLDSADRTEEAIKILKGVTSEDPKDLEAIMALGNIERGRKRFGDCGATYSLGIDVLPPGNDKANSVWYYYRGICQERSKQWAKAEADMKKALELQPDQPHVLNYLGYSWIDQGINLDEGMKMIKRAVEQRPDDGYIVDSLGWAYYRIGNYEEAVKNLERAIDLKPEDPTINDHLGDAYWRVGRTLEAKFQWSHARDLKPEPEELPKIEAKIANGLPDDNSNSSAAQAEKKKDDGKGG

SEQ ID NO: 14461 - protein, 294 aa, BradyrhizobiumColbertium
MPALTEEGRAKVNLSLRVVGRRADGYHDLESVVAFADCADRLTLEPGGELKLNTTGPLAAACGDNADNLVLKAARLLAEAVPNLKLGAFTLDKVLPVAAGIGGGSADAAAALRLLARLNGLSLDDPRVQKVALATGADVPVCLLSRACDMTGVGEQLLPLALPSMPCVMVNPRVPVATKDVFQALGLRNGELLVGVTDVIRAPAWPEEGASIADWVEVLETVANDLEAPAMRIEPVIGEVLEALRGSAGVKLTRMSGSGATCFAIYGSSADAHAAAEKIRRDHSGWWVHAGTLS

SEQ ID NO: 14462 - protein, 292 aa, BradyrhizobiumColbertium
MASAPQSRFYESHGLRLHYADWGNESAPPLILVHGGRDHCRSWDHIARSLQPNFHVLAPDLRGHGDSDWTRGGSYALTEYVYDLAQLVRHIAAPQITLIGHSMGGMVSLILSGSFPELVSKLIVLDGVTMLPDARKPPAHERIGKWVTQLDKLHDRIPRRYSTIEDAAAQMMLHNKRLSRDLALHLAAHGTRQNEDGTYSWKFDPYQRASAPHRLWPDDHIELWSRIACPTLLLNAGESFLAGAKGTSLERYFQDARIETIAGAGHWLQHDKPHEVLGEIRDFLKLDESSAG

SEQ ID NO: 14463 - protein, 210 aa, BradyrhizobiumColbertium
MIETNFWLFLATACLIAAVPGPGIFYVAARTLSEGRASGFASTAGTALGGLVHVVAGSLGISAIILASAELFAAVKFVGALYLVWLGIRTFRSAGRGLSFEGEPVGDKRAFRDGVLVEALNPKTAAFFLAFIPQFLDPAGTNPALQFIMLGTISVTLNTLADVVVVAMASATRTQLIGRPHLMRRLTQGSGVFIAGLGLSLALARRPANG

SEQ ID NO: 14464 - protein, 420 aa, BradyrhizobiumColbertium
MRRIVVTGMGAVSPLGCGVELSWRRLLAGQSGLRPLPEWAQALPARIAGLVPDRADDTKGGFDPAQAAAPKDQRKMDRFILFALLATAEAVAQAGWTPLDAAALERTATIIASGVGGFPAIAEAVRITEQRGARRLSPFTIPSFLANLAAGQVSIKYGYKGALGTPVTACAAGVQAIGDAARMIRAGEADVAICGGAEACLDIVSLGGFAAARALSSGFNDEPERASRPFDRDRDGFVMGEGAGILVIEELEHALARGATPVAELVGYGTTADAYHMTSGPPDGEGARRAMEIALRQAKLAPADVQHLNAHATSTQAGDESELGAIGALFGRTRSIAVSATKSATGHLLGAAGGLEAIFTILALRDQIAPPTLNLENPDAGADGIDIVAGTARPMPMEHAISNGFGFGGVNASVIFRRMG

SEQ ID NO: 14465 - protein, 171 aa, BradyrhizobiumColbertium
MQPKSPSIQECPVGRAVETVGEWWSILILRDAMQGATKFDEFSQSLGIAPNILSRRLAHLTESGMFTRRRYQDRPPRYEYVLTDKARDFFPVIAALLAWGNKHLARKGKSILLANRSDARPVDPVVVNAGDMQPITLANAVVIAGPRASRKMRARLASLKAMNPAVVPAGD

SEQ ID NO: 14466 - protein, 43 aa, BradyrhizobiumColbertium
MRSGISGDGVGLIPLLPPSHCERSEAIQNPAAATGWIASLRSQ

SEQ ID NO: 14467 - protein, 335 aa, BradyrhizobiumColbertium
MAVIVPFEAPGASIEELVALVAPDMERVNATILSRTGSDVTMIPEVANHLISSGGKRLRPMLTLAMANLAGYTGDGHIKLAASVEFMHTATLLHDDVVDESEMRRGKLSARMLWGNEASVLVGDFLLGQAFRMMVEVGSLRALDILSAAAATIAEGEVMQLAAAKNTATTEDEYLAVIRGKTAELFAAACEVGPVIANRPKAEQTACRSVGMNLGIAFQLVDDVLDYGGKSAKLGKNTGDDFREGKITLPVVLAFRRGNDTERAFWIRALERGEIGDTDLDHAIGLMNKHRALEDTLSRAQHYGAMAVDALALFPSSPMKSALEQVVAFCLARSH

SEQ ID NO: 14468 - protein, 75 aa, BradyrhizobiumColbertium
MRELVRTNDMVLVSAIGALLDGANIHHLVLDQNMSIIEGSLGILPRRILVHEDDVLEARELLTEAGLSHELRGDD

SEQ ID NO: 14469 - protein, 275 aa, BradyrhizobiumColbertium
MIEAADMTEDAFLGGQLRLRQKRSGHRAGHDAILLAAATDARAGDRVVDLGAGVGTAGLALARRAAGIRLSLVEIDPELAELARGNALANGIAAETIVLDVTADAQAFAANGLAPDSVDAVLMNPPFNDPARHRGSPDQARHAAHVATEDTLHAWVHAARRVLRSNGVLTLIWRADGLADVLAALSRGFGSLSILPVHGEAERPAIRVLVRAVKGGRAPTRLLPGLMLNDASRSSGSEVTEILEGRAALPLVEPRGLTGEAIPAVAPAGRSGGSP

SEQ ID NO: 14470 - protein, 302 aa, BradyrhizobiumColbertium
MAEQLNDRESSGLADRLMQYLPARFRPGTAVVPVVRLSGVIGAVTPLRPGLTLAGIAKVLERAFSYRHAKAVALVINSPGGSPVQSRQIYLRIKQLAAEKKLPVLVFVEDVAASGGYMIACAGDEIICDPSSILGSIGVVGGSFGFQEAIRRLGIERRLYTSGEHKAMLDPFLPENPDDVARLKAIQREIHQIFIALVKESRGARLKGADETLFTGEYWAGDSAIALGLADGIGDLRSTLRARYGEKVLTPVIAQPTGLLSGFLGRKSPGAGQLSALESIAGLPDELISAVETRAIWAKFGF

SEQ ID NO: 14471 - protein, 63 aa, BradyrhizobiumColbertium
MPPFVAFAGVLGGLAVVRWAYKTAMKINQELDEMRLSRVTEAAPMGDIKTLKRDPVSGAYRPG

SEQ ID NO: 14472 - protein, 311 aa, BradyrhizobiumColbertium
MDASLPAHMRPERSFQGFILALQRFWAEQGCVILQPYDMEMGAGTFHPATTLRALGPKPWNAAYVQPSRRPKDGRYGENPNRMQHYYQFQVIMKPSPPNLQELYLKSLAAIGIDSAVHDIRFVEDDWESPTLGAWGLGWECWCDGMEVSQFTYFQQVAGFECAPVAGELTYGLERLAMYVQGVDRVYDLNFNGRDGDQKVTYGDVFLQAEQEYSRHNFEVADTAMLFEQFKMAEAACRKYLDAGWKDGKREAHLMALPAYDQCIKASHVFNLLDARGVISVTERQSYILRVRELAKACGEAWIHTEAGGAA

SEQ ID NO: 14473 - protein, 699 aa, BradyrhizobiumColbertium
MPDLLLELFSEEIPARMQGRAADDLRRMVTDKLVAEGLVYEGAKAFATPRRLALTVHGIPARQPDLKTERRGPKVGAPDAAVQGFLKATGLKSLDEAKIQRDPKGDFYIGLIEKPGRDAIDVLAEILPVIIRTFPWPKSMRWGARSGKPGSLNWVRPLHAITATFGLETEEPDVVKFEVDGIEAGQTTYGHRFLAPAPISVRRFEDYEAKLLDAKVVLDPERRKDAILTDAKQLAFAQGFELVEDQNLLDEVAGLVEWPVVLMGSFEEEFLATPAEVIRATIRNNQKCFVVRDPKTGKLANKFILVANIEATDGGKTIVAGNERVIRARLSDAKFFYETDLKTKLEERLPKFEQIVFHEKLGTQAERIKRIERLAAEIAPLVGADVAKAVRAAHLAKADLLTEVVGEFPEVQGLMGKYYALAQGEEASIAVACEEHYKPQGPADRVPTDPISVAVALADKLDTLVGFWAIDEKPTGSKDPYALRRAALGVIRLIAENDLRLSLLKIATSALAGLSVKAAEAQKLPSDLLAFFADRLKVQLREQGARHDLVDAVFALGGQDDLLMIVRRVEALGKFLETDDGKNLLAGTKRASNILSIEEKKDKRTFDGAPDAALYSLVEEKALAQAIGEVKAEASAAVAREDFAVAMSAMAKLRPPVDAFFDKVRVNDDDARVRENRLKLLNEIRSATRAVADFSKIQD

SEQ ID NO: 14474 - protein, 117 aa, BradyrhizobiumColbertium
MRNRILALAALAAAIGSPLAAQAQSGVTVGRAPASVDSAVTIAAEQRPAFREYVVQQRVPPFSIPDRVVVGTTLPEAGVTYYDVPQRFGATTYRYTVVNGETVLVEPRSRRIVEVVD

SEQ ID NO: 14475 - protein, 51 aa, BradyrhizobiumColbertium
MHITVAHISPILSLIAGVLILIMPRLLNLIVAIFLIVNGAIGLGLLKWLRF

SEQ ID NO: 14476 - protein, 975 aa, BradyrhizobiumColbertium
MAKAASKPKKMPAKSKSSAVAKAAPPARKTLAKSAPKPVAKAAGKPAAKPTAKAATKPALPKAAAKPAPKKAAPAKAAPAAAKAGKWVFTFGDGKAEGRSEMRDLLGGKGANLAEMANLGLPVPPGFTIPTSVCTYFYEHDKTYPKELKPQVEKALDYVGKLTGKVFGDTRNPLLVSVRSGARASMPGMMDTVLNLGLNDQTVEALAELSGDRRFAYDSYRRFITMYSDVVLGFEHHHFEEILDTFKDSQGYTLDTDLSADDWVELVGKYKDAVARETGKEFPQDPHDQLWGAIGAVFSSWMNARAVTYRKLHDIPESWGTAVNVQAMVFGNMGETSATGVAFTRNPSTGESKLYGEFLINAQGEDVVAGIRTPQDITEEARRESGSDKASMESAMPEAFKELTRIYTLLEKHYRDMQDMEFTVEQGKLWMLQTRGGKRTAKAALRIAVELANEGLISKKEAVTRIDPASLDQLLHPTIDPNAKRDVIATGLPASPGAASGEIVFSSDEAAKLQGDGRKVILVRIETSPEDIHGMHAAEGILTTRGGMTSHAAVVARGMGKPCVSGCGTIRVDYGRGTMSIGSRTFKTGDVITIDGSLGQVLAGRMPMIEPELSGEFGTLMNWADQVRKIGVRVNGDTPDDARTAIKFGAEGIGLCRTEHMFFEETRIRTVREMILSEDEQSRRAALAKLLPMQRADFVELFEIMKGLPVTIRLLDPPLHEFLPHTHAEVEEVARAMNTDPRRLADRARELSEFNPMLGFRGCRIAIAYPEIAEMQARAIFEAAVEAEKRTGRAVGLEVMVPLIATKAELDLVKARIDSTAQAVMRETNTKLAYQVGTMIELPRACLLAGEIAESAEFFSFGTNDLTQTTYGISRDDAASFLGPYVAKGILSVDPFISLDQEGVGELVKIGVARGRKTRASLKVGICGEHGGDPASVAFCHHIGLNYVSCSPYRVPIARLAAAQAALGKAIASQA

SEQ ID NO: 14477 - protein, 87 aa, BradyrhizobiumColbertium
MTREGRGEPPPLSFYAALFPARALATNQSRLPQRKGSGLLRCARNDEFAARTRCTLLHRPACRGDAVCRDDADEWRSGAPDARFLSA

SEQ ID NO: 14478 - protein, 482 aa, BradyrhizobiumColbertium
MSVLRNHPKGARFASFGIGLCIFALMPRETGYQDIASLLARQPGVAERWQKQVFSAASSIQLATYSFARPIGTSVPQSAMVRLASIDGRDVTGAISRNPALQAPPRYQASDFPTVDRSLKGDRLAIVTPTQAPETVAPAVAPAQEDPATSNSSVFGAKTAALPHPMSPESAAALDPELQEALRAPPLPQYSNSPQASDAARTLATAPLETLKGASVPPAPAPDPFSVKTSTLFFASSSLGGNPETMESWQPGAEPLIVMPDPDMKVTAALTPPTADIARNIDSGESVAAKGEVNGDNQRARSPAERLGLDDKSRAKSEKCLAEAVYFEARGEAVRGQIAVAQVVMNRVFSGKYPETVCGAVYQNKHRHLACQFTFACDKNPDVIREPEMWERAKRIARAMLDGQIWLPEVGKSTHYHAYWVRPSWVAEMKKLYKTGVHTFYRPRNWGDGSEEPSWGTQAQTAALSAELVQEARSSAELGERR

SEQ ID NO: 14479 - protein, 292 aa, BradyrhizobiumColbertium
MISPTSLLYPDAFLSSLAIETAVDRALDEDLGRAGDITSLATIPETTSAQAVLVARQSGVIAGLPLALATLQKLSPEIEVRAQVRDAARVARGQHVLTISGPARSILTAERTALNFVGRLSGVATLTADYVARIEGTGMRICCTRKTTPGLRALEKYAVRCGGGFNHRFGLDDAILIKDNHIAVAGGIRPVLERARAHAGHLVKIEIEVDTLVQLREVLDSGMADAVLLDNMDLATLREAVRINEGRLELEASGGVTLDSIAAIAATGVDYASAGALTHSAPNFDCALDIEA

SEQ ID NO: 14480 - protein, 534 aa, BradyrhizobiumColbertium
MQHDIHDLARTDDVVIVGGGLAGLFCALKLAPRPVTLISAAPLGQGASSAWAQGGIAAAVAEGDTPEAHAADTVAVGGGLVDEAVALGIAREALPRIHDLLAFGVPFDRDLDGRLAAGREAAHSARRIVHVRGDGAGAAIIAALSDAVRRTPSIRLMEGFVAEALLTADGAVSGLQLRKAGNPAARQIVLAARAVVLATGGIGHLYAVTTNPVEASGSGLAIAARAGAVIADPEFVQFHPTAIMVGGDPAPLATEALRGEGATLINGKGERFMLSRHPLAELAPRDIVARGVFAEIAAGRGAFLDARQALGARFATKFPTVHASCTAAGIDPATQPIPIAPAAHYHMGGIAVDARGRSSIDGLWAAGEVSSTGAHGANRLASNSLLEAVVYAARVADDIAGRTMSSTARPPDPVVTARGGAADSAAVKRLRTMMSAHVGVIRDGDGLAEAVRRFAAIEREAGDIVLRIMATSALLVATAAWTRRESRGAHFRSDHPAETPGPGRRTMTTLSAMRDVAHSLDDRPLPRIAQSMIA

SEQ ID NO: 14481 - protein, 368 aa, BradyrhizobiumColbertium
MPITGIYGPDDFTDRPQAQRNSSPGTVAVPAGPEWPIPSLEWTSEIERATAPLYDRVKHVIPPIEWPLMAPAIHAINELKRARGAVILAHNYQAPEIFHCVADIGGDSLQLAVEATKVKADIIVQCGVHFMAETSKLLNPHKTVLIPDSRAGCSLAASITGADVRLLREKFPGVPIVAYVNTSAEVKAEVDICCTSSNAVQVVESLNSPSVIFLPDRYLATYVASKTDVNIIAWKGACEVHERFTGEELRSFREADPSVQIIAHPECPPDVLAEADFTGSTAHMINWVRAKRPRRLVMITECSMADNVRAELPDVEMLRLCNLCPHMKRITLANILESLLTLREEVSIDPALADRARRSVERMINLRN

SEQ ID NO: 14482 - protein, 417 aa, BradyrhizobiumColbertium
MSTQIGELAPASRSSNWRTPAVIILCGCAIGMLGFGPRSALGFFVQPMSHEFSWGRDVFGLAIAVQNLLWGLGQPFAGAVADRFGLFRVMCVGALLYAGGLLLMRYSTTPLSLDIGAGVMIGFGLAGCSFNLVLSAFSKLLPPEKRGLALGAGTAAGSFGQFLFAPIGVALIDNFGWQQALSVFGFLMLLIIPLSLALSTPPVAESAKATAADEQTFTRALAEAFGHRSYVLLVLGFFTCGFQLAFITVHLPAFLVDRGISAQTGGWVIAAIGLFNIIGSLSVGYLQNHLPKRYILSTIYFTRALATLAFISFPITPFSAIAFGAISGLTWLSTVPPTSALVALMFGTRWLATLYGFAFVSHQVGGFLGVWLGGIVFERFGSYTPIWWLSILFGVLSALINLPIVEKPVERAVAQPA

SEQ ID NO: 14483 - protein, 328 aa, BradyrhizobiumColbertium
MATFKAIRIDKADKGTTAQLTQFDEAELMDGDVTVRVEWSTLNYKDGLALTGKAPVVRRFPMIAGIDFAGTVEASSHPQWKAGDKVVCTGWGMGETHLGAYAEKARVKGDWLVALPQGLSARDAMAIGTAGFTAMLAVLALEKHGISPKSGPVVVTGAAGGVGSVAIAVLAKLGYHVIASTGRASEADYLKQLGAAEIIDRSELSAPAKPLAKERWAGGVDSVGSTTLANLLSMTKYGGAIAACGLAAGMDLPSSVAPFILRGVCLLGIDSVMCPIEPRKAAWQRLASDLDRTKLVEITKEIPLSEVSDWGAKILAGEVRGRIVVKIV

SEQ ID NO: 14484 - protein, 195 aa, BradyrhizobiumColbertium
MLARIVLGAVTAAATFAPAIAGSMNADEARRFVAGKVFAFTCFDGTRGAGRILDDLGAAGAVQFSGAGPVKHLRLPGNTLQIRGQNVCASIKGIPFEPCFNLEKTDDRSFRGSVSGMGFAYCDFRHQGGNQMLMARATARPRSPRNSDRTGSVGPANTEVAARVETPRVESSRLEPVKPEPAKTEAPLELRRSTQ

SEQ ID NO: 14485 - protein, 81 aa, BradyrhizobiumColbertium
MSLYFFRISTGRYSGAADQPYEFEDRAAAWTEMTEVCANLLGSIARGLKPNAEWCMELIDENKNPVFRVTLIGETVGCKAS

SEQ ID NO: 14486 - protein, 578 aa, BradyrhizobiumColbertium
MFSLLQNLQIGTKLAIASALGVLLVGAMIASQTLGNASIRETSQSALAQQQIARDAVKAEATVRGMQLAVRDIRLANSPADIQKATQNLGEQQKSTSFLVDEMLKLSHEMENRAPIEKLRSLAANYEKAAQQIARVRGEAVAASGADGATRAAKLNEDAIRMAREITLPIAGELDVVIGQIADHARHKSEEKNALAAAQMRSSEQLAILVGAFAALVLVCSWLMSFLTVARPIRALTVAMDKLAGGDFSVVLPGLGRKDEVGGVAAAVEKFKLVSEQKAREEAEAKIRQDQIAAAQRKAEMHKLADSFEAAIGEIVDTVSSAATELEASASTLTSTAARGQELTTMVAAASEEASTNVQSVASATEELSSSITEISRQVQESARVAGDAVSQARTTTDRVGDLSAAAARIGDVVELINTIAGQTNLLALNATIEAARAGEAGRGFAVVASEVKALAEQTAKATGEIGQQIASIQTATDHSVGAIKDISHTIEKLSEISSTIAAAVEEQGAATQEISRNVQQAAAGTHQVSSNITDVQHGASETGSASAQVLAAAQSLSGDSQRLKLEVGKFLSTVRAA

SEQ ID NO: 14487 - protein, 79 aa, BradyrhizobiumColbertium
MGIDVLHRADRHHADTGEGEHEDRQHGQQLENDRQLRHHDNPGSTSNAQITCAAIVAADDRAGVIPTMLAGSYPVRLRL

SEQ ID NO: 14488 - protein, 109 aa, BradyrhizobiumColbertium
MSGIQAATQESVSAIQEIGGTIERLSEVSSAIAAAVEEQGAATQEISRNVQQASVGTQEVSSNITNVQRGAIETGSASAEVLSAAKSLATDSTRLKVEVAQFLESVRAT

SEQ ID NO: 14489 - protein, 795 aa, BradyrhizobiumColbertium
MPAPAPGFEERLGTRWVVWIGGLALALGGFFMVRYSIEAGLLGPGVRVFLSGLFALALLGAGEWTRRKESISSLQALPIANIPAILTAAGTAVAFATIYAAYALYEFLVPATAFVLLGLVALGTLAAALLHGPALAGLGVVGAFVTPILVSSGKPDYWALYVYLAIVTAASFGLARIRLWRWLAVTTIVFAVLWTFPGLDAAELQVAPHAFHVIAGFLLAALLVVCGFMFGPGIDDGEIEPVSSSALGAYLFGAMLIVLSSGHADLALLAFTLLVAGTLFVAWRAPAATGALGAAAATVFIVFAEWAVRANPDMLVLPGGAMPGIGPTATGSAVTLHLVMAAIFAAGFGIAGFLAQGRSNSAIIPVVWSATAVAMPIAILVALYARIAHLDRSIPFAIVAVLLAAAFGAATEALARRETRPGIAISTALFATGTLGAMALALTFALDKGWLTIALALMSLGTAWISMQRPIPFLRWLAAILAGLVTARIAYDPRIVGDAVGTTPIFNWLLWGYGVPAASFWAASIFLRRRADDAPLRMVETAAILFTALLAFMEIRHFAAGGRMTVPPSLLEFALQVCITLAMAIGLERLRLRSHSIVHNVGAVVLTAIGGLISVFGLLIMENPLLWRIDVGGAVFNLLLLGYALPAVLMLLLSYAVVGERGKVYANTIAAGALVFALAYVTLEIRRFYHGPILSTGPTTGAEQYTYSIGWLAFGVALLGVGILVNSERARLASAAVIALTILKAFVIDMSTLTGVYRALSFMCLGVVLVAIGWLYQRILFRRQAAPPPAAQTGT

SEQ ID NO: 14490 - protein, 279 aa, BradyrhizobiumColbertium
MVDRSTEPLPENAPGADKPTQLGIQSVEVAGDLIHALIQADGPLKLADLAQRAGMPSAKAHRYLVSLMRVGLARQDAATSRYDLGPVAFQLGLKGFSRFEPLQVAEATLHTLVDQVGETAALAVWGEKGPTMIKVVEARHDLASTMAPSHHCPLTYSATGLLFCAYEDPVRTATAIERELDQNRRSGRLNVPKERASLAGMMREIKERGYSCLSDGGGDGFGAVSAPVFDITGKLIMALTVFGRSTRVDAKPNGALGKLVADTAAELSASLGYHGAHGR

SEQ ID NO: 14491 - protein, 256 aa, BradyrhizobiumColbertium
MHDGSISGLLAGDVAVVTGAAQGIGAAIARGLATSGASVIVVDRYAEGACATANAIKAVGGHAEGYGLDVADRAACFAFATTAREVFGDVAVLINNAGITRRTAPDDPEFLNHLDAQIAVNLNGTANMTIALLPQLRRTKGRVVNVGSIASFVAYRNSASYAATKGAVIQLTKALAADLAADGVRVNGIAPGVIATPMTEGTRANPEVMARFLNHTPMGRVGEPEELVGPTLFLASRMSSYVTGVMLPVEGGYLTS

SEQ ID NO: 14492 - protein, 575 aa, BradyrhizobiumColbertium
MVASSKHAIPNETQHCDVLVAGSGASGMVAAIVAAKKGLKVIVAEKEAVFGGTTALSGGYLWVPNNPVSIEAGVKDSKDAALAYMKHESGNHYDAARVDAFLDAGPEMVAFMHAYTQVRFEAAPAFSDYHPDAPGGTPGGRSILTQPVSATILGSDIDKLRPPRPELTLYGLAIGSGKELWHFYRATQRLESFLYVAKRLVKFGFDRSVRGRSMLLTNGNALAARLFRSACELGVPIWLDSPVRTLIRNDRGHVVGAEVLTPKGRRRVLANKGVVLACGGFPFDFARRQTLYNHCAGESEHWSAASPGNTGDGVRLGESVGGEVVKDYPNAGAWAPTSLVPRKDGTKGPFPHFIDRGKPGVIAVSRAGRRFVNEANSYHDFVQGMECACPSDQPAEAFLIADHRTIRKYGLGHVKPAPLPLQPSIRSGYLMRGNTLAELASVAGIERNAFEETVARWNADVPTGTDTAFGKGSTAYNRFHGDPEVKPNPCLAPIATGPFYAVRVVPGDIGTFAGLKTDEHARVIGPDNTPLKGLYAVGNDMASVLGGNYSGGGITLGPGMTFGYIAGLHAASERN

SEQ ID NO: 14493 - protein, 372 aa, BradyrhizobiumColbertium
MAVALLGAAQAQDKEIRIGALIAASGPTAFIGASQKNAFEMLVEQINARGGMAGNKIRPFLYDTEGNGTIAAQQFRRLIDSDKVHVVVGPSTTGESLAIRAVANENKVPLVSFAGAEAVVVPPTPYVFKTPPTDRIVAEHLISFMKVKGATSVGILSSADGFGQAGAAVVKEVASQLGLKVNAAEEFGPRDTDMTPQILKIRSSGADAMLIWSVNPGPTIILKNAAAIGYNKPIYNSYGAASPQLIEQAGAAAEKSYVSSMRLLAPESLAANDPMRPVVTKLAADYKEKFKADATTFIGHPSDAMLLIEEALKKAGGSPDREKLAEAMRSGISFPGANGMFRFTDANHNGLDRESQSMVMLQVQGGKFVTVK

SEQ ID NO: 14494 - protein, 293 aa, BradyrhizobiumColbertium
MDTLLQILITGLVVGCIYGMAALGFTIVYNATKLINFANGEFLMLGGVLLACAAQAAKLPMSLALLLAVAGAALTGWLMQRCILDMAMARSSDPLTLVMLTIGVALALRGAAALAFGREITFVPEFGLLPLVLIGNVYIPSQGLWIIFVLALTSTVLWYMFSKTMFGKAMRAASQEPRAAALCGIEPKRAAAIAMTLAGALGGLAGAMLAPISAAFYENGIFLGLKGFAAAVAGGLGNPIGAIVGGLLIGVVESLSAGYVASGFKDAVGFILLILVLILRPQGLVGRAIVTRV

SEQ ID NO: 14495 - protein, 321 aa, BradyrhizobiumColbertium
MTTSTSNSNLRHDAVILAGLAVVLTLAELALTSQFHRSILILSMIHAIAAIGLTLLLGYAGQVSLGQGAFMGIGAYAAAFALQKLALPAPVALVAAVLLPGLLGFLIARPILRLSGHNLALGTLALGAVFFVVAAQWRSVTGGLDPGIVDLPSLAIAGFSHERILYILAGISLLSAIAVAVSLVDGRFGRGLMVLRTSELVAACMGVDTVRAKSMVFAIAAALSGLSGALLALYLRSFNASAFGVGLSIELLMMVILGSLSTVWGAIFGAFAIIVLPNLLEGFDHAKHLIYGLVMVGIMMFAPRGLGETLFRLVTRKRSVA

SEQ ID NO: 14496 - protein, 260 aa, BradyrhizobiumColbertium
MSSTPLASIKGLSKRFGGIAAVSDVSFDLVAGEVTALIGPNGAGKTTLINLVTGVLACDGGTISLEGEDITARPTHQRGTAGIARTYQTPQIAHGMSVLTNVMAGAYRFGQHGLLSSVFRPWVVMKENDEMAARAAQCLTRAGVAEQWWQRLATDLPYGLQRRVEIARSLAQDPKLLLLDEPAAGLNPSETADLSRLLSEIAADGRAVLLVEHDMGMVMSISSHIVVVNFGRKLAEGTPKDIASNKDVIAAYLGADEAVA

SEQ ID NO: 14497 - protein, 241 aa, BradyrhizobiumColbertium
MTELLSIADLKAGYGPVEVLHGISIAIRKGEIFSIVGANGAGKSTLLNTISGFNPIRSGAIVFDGRPIAGTAPAMIARAGLRHVPEGRRVFAEMTVEENLSLGGYGQPHAEVADRIDRIYELFPRLVERRTQAAGTMSGGEQQMLAIGRALAAKPRVLMLDEPSMGLAPQVVAEIFRLILRMRHELGLGILLVEQNAKAALRIADRACVLSLGQITLRGAGADLLNDPSVVEAFLGGNAAT

SEQ ID NO: 14498 - protein, 359 aa, BradyrhizobiumColbertium
METHRISESGPDRELLGSLRALTGLDTPATIERFETEYPNATFWATFGQSEASGLAMLSPYRDRPKSAGRPLFWRSIAVVDGDDRANPAGEIIDFVNGQIARYKRPKHVVLVDKLPRTAGATSIGLLLNQRTADVAVKVTRHDGLPHPTAAERRRIPSRHSRCSRAQSSATGMMSLTPPTPCPAVQISFHSFGLISRATLKLLWSFGLSYGRFSVWARKLAPATRTGTDGNDPVGVGVERLLGMLHRGRVVEHQPAIGMYGVGQFSRNSEGRDDDGNFMTDGRGEVCRVPRIGGVNDELRTKGRAMLPGEPAAYVGQPRFETVRRALVEHRKGADHASLTGLNDQIRSRETSALPSPEF

SEQ ID NO: 14499 - protein, 257 aa, BradyrhizobiumColbertium
MELHGKIAVVTGAASGLGLATCKVLAAAGVRIAGFDRDEKKLQALKSNLGDACLARVVDVAEESSVKDGIAAVVAAFGGVHVAVNCAGVADAAKTVSKGEPFPIATWNKVIAINLTGTFNVIRFAALAMTRNTPDAEGGERGVIVNTASGAASQGQVGQAAYSASKAGVIGLTLPVARDLAPHGIRIVSIAPGLFDTAMVAGIPDNVSQSIVDRMILYPNRMGQPREFARLVQHIVENSYLNATTLDLDAGARMQSR

SEQ ID NO: 14500 - protein, 406 aa, BradyrhizobiumColbertium
MGVGMTPFGRMLDKDIKTMTKEAVNAALADAGLATTALEAAYFANASQGHMEKQHMVRGQIALRSMGIGQIPVVNIENACASGSSALNLAVTFLKAGDGDVALAVGAEKMFSRDRELMFGSFDSAWDISRKDEIGERLMKLGEGIDPPPGTTSDKPYSVFMDVYAAFSRFHMARFGTTQRQIAAVAAKNHRHSVENPLSQFRTPYSIDEVLSAPPITYPLTLPMCSPVSDGAAAVVVTTAAGLKRYGIDRSRAIRVLASVVQTGSDRDPSDVENHCTARAARRAYEKAGVGPGDISVAEVHDATAMGEIIQIENLGLCAFGDGGAISERGETAIGGRVPVNPSGGLESKGHPVGATGLAQVHELVAQLRHEAGARQVDGARIAIAENGGGLHGIEEAVACVTILSK

SEQ ID NO: 14501 - protein, 371 aa, BradyrhizobiumColbertium
MLQLEGIRIVSLAEQYPGPYATLLMADLGADVILVERPGIGDPARQFPAFHAALNRNKRSVALDLKADGDKQRFRDLVASADVLLEGFRPGTMQRLGLGYEAMASINPRLVYASISGFGQTGPYRDRPAHDLSYQALAGFLHAQAATRSTQLPSDIAVGDLSSGMFAALGVLAALLARARMGKGAYIDVSMTDGLVSWMSVMVGPAMNGEPLADIAAEPAYGLFECQDGKLLSLSIAHEDWFWRPLCTLIGMEDVADLKRAQRTRREVELVARIGKAIAAAPRGQWADKLDAAGIPWGPVSAIDEVAADPHFIERGLFGEVADSDGRRRRYVAQPLIIDGHHPGPTRGVPGLGEHTEEVLSELSLRAQNIT

SEQ ID NO: 14502 - protein, 268 aa, BradyrhizobiumColbertium
MTTSEKIKPEQSVLVEVRADAVWITLNRPTALNAITPDMVAGITAALTHADDPAIKAVVLMGTGRAFCAGADLKYVNSATQGDAPAATRFLDAVLDMMARLETCPRPVIAAVNGLALAGGLELVLCCDLVIAARSAKLGDAHANFGLLPGGGSSVRLPRKIGPTRAKYLLFTGDFVPADDLVACGLVNEVVDDAELTAAVERLAAKLGSKSSLVLRRMKALVADGLEQPKEVALRLELLASEVHAHSHDMKEGLAAFEQKRKPSFIGR

SEQ ID NO: 14503 - protein, 263 aa, BradyrhizobiumColbertium
MLELSNVEVIYSDVILAVKGITLVVPKGSCVTLLGGNGAGKSTTLKSISNLLMTEDGKVTSGTISFEGSRIDGGDPAKIVRNGIVHVMEGRRVLSHLTVEQNLIAGGHMEPSAPAMRRRLDGVYDRIKRLALLKSRTTGYLSGGEQQMVVIGRALMANPKLMMIDEPSLGLAPMMVDEVFGVLRSLKEDGLTLLIVEQNTRVALDLADFGYVMEDGRIVLEGNAADLRANEDIREFYLGLNLEGVRKSYRNIKHYRRRKRWLG

SEQ ID NO: 14504 - protein, 409 aa, BradyrhizobiumColbertium
MKSRRFKWIAGAAAVAVVTLALPASAQTTYNIASIADFTGPYADIMKDLVGARRATVDWWNEEVGKGMGIKIGIKDFDGRYDAAQTASLWPGIKAELNPVAVLGVGGPDVAALQGRLPADKVPMLMSTAGYGFAWKGDPWIFNPRPTYGHEAAGFFEWFRSTRGIKGPLKVGIISSEASPAYVDIAKGAEKFAKDNPDKAEIVETIFTEVQPTDLTTQVGRLIRKGVQVIDIQTNTAAVVATKRALQALGKADIPIMMSSHNGLIASGKAVGGMKDLEGDYEVYGMAVPTEQKTKAHDFHQMVVAKYKSQATWSVASVMGYNQTLVALRAIEAAARKVGADKVTGEAVRTALLTTPISADQTFSILPNLTYTNEAPFPVKGLTVNVATIKDGKYVIAAENVPVPTIAKW

SEQ ID NO: 14505 - protein, 348 aa, BradyrhizobiumColbertium
MDPAGIFATSFARDAALVRTRPQQIALALFLIFLLALPILFGPRLLAISTLILISSVIVLGLQVTTGYAGQINLGQAAFMGVGAYTTGFLATKLGFPFWLTIPLGGCSAAVFGFIFGLSAVRIKGFYLALTTIAAQALFHFFVLNLPWFGGSNGLTLDPASLFGFAFATDISIYYLCLAVAALMTFGAYGMVRGRYGRAFVAVRDDDVAAGIMGIDVVAIKATAFLVGAFYAGVGGGLWAYFVRFVAVDQFTLFNSIWFIAMIIVGGMGSITGALVGVVVIKCIQEAFVSLGPSVVSQFPSIGGDVVFSLMNVFLGSVIAAFLIFEPRGLMHRWNILKRSYRTWPFPY

SEQ ID NO: 14506 - protein, 294 aa, BradyrhizobiumColbertium
MIDFLNYLINGSLVGLLYALIAMGFIVIYRASKVFNFAQGELVVFGGFIVWWMVIQTGLPLFVALPLAMAVSAIFGLIIERIFFSRLVGESSFAMVMVTIGLLILIRGLILLIFGPQVRPFPIIFALKPVIIGDILIPRSLLIGAVITVIVGLGLSWFFNNTRAGLKMTAVAEDHQVALSMGISVKRSIAFAWALGAVLSTLGAIIYLSGKSLNFLASDIGLSALPVALLAGFESIAGVLLAGLIVGAVQGLVTAYVDPVVGGAVGSVFPFVIMLVILFIRPTGMFGWRTIERV

SEQ ID NO: 14507 - protein, 653 aa, BradyrhizobiumColbertium
MKTLPQAFVDRATAEPERLIARHKYRGIWREFRYGDVLERVRNLAVGLQSMSFARGETVAIIGENEPENFWMELAVLSLGGKVVSLYPDLTVGEIEYLLNDSQAVYFVGQDQEQIDKGLAVLGSVPTLRRLIYWDDTGMWSYRQPSLMKLEHMEDEGRKRNAAEPGLFDSLVALGQPDDIAILSYTSGTTGRPKGVIITHRYLIDNAHRLVNGTDLTPGMDYLTYIAPAWVTEQLFGVTIGVTLPLVVNFPESPEQVLANLRELAVEAMVFAPRQWESLASTIQAKMLDAGPIRRRIYEWGVKIGRKVNVARLDGKPVPLAAHLAFPIAETLVLKPLRDKLGLTRVKVALSGGSTMAPDVFRLFHAIGVPLRNIYGSTEIGIMTIHKGERYDLETVGHWLEAHPATAALEWKVSPDGELLVRGGSFFQGYFGKPDKTTERIDGGWYRTGDAVSVTTSGELVFLERIEDLAKLSSGQSYPPQFIETRLRFSPFIKDIMTLGDASRDYIGALINIDMGVVSRWAEERRLAYSTFADLSQMTAVADLIREEIVRINKFLPDHAQVRRFANFPKELDPDEGELTRTRKLRREFLVQRYAELIDGLYAGKDRVALSIPVTYQDGRRGTMAANVLIHSVDAAPLVATAVQARRKMAGMS

SEQ ID NO: 14508 - protein, 269 aa, BradyrhizobiumColbertium
MSAEAATHAEPNVSGMRPMLTADRLRMSFGGVVALNEVSIEIRPDELIAVIGPNGAGKTSLMNCMSGFYRPQQGRIVFDGEQMVGRSVHQIARSGLARTFQGTHIFPGMTVIENILIGRHMHMRSSILQAFVHFHWAQKEEAQHREVVEEIIELLEIESIRHQPVGTLGYGLRKRVDLGRALAQEPKILLMDEPMAGMNNEEKEDLARFILDVREARGIPVVLVEHDMGVVMDLADRIYVLDFGKMIATGTPAQIQRDPLVMKAYLGEK

SEQ ID NO: 14509 - protein, 323 aa, BradyrhizobiumColbertium
MLGDPNLAVQLRTQLKLPVLVGPMFLVSGPDLVIACSQAGVAGSFPTLNARSTAILDQWLARITAELQPDAAPYAANLIVHPTNTRLAEDVDLVVKHKSPLVIASVGHPGRVVAAVKSYGGLVFSDVASLKHAQRAAETGVDGLILLCGGSGGNTGWLNPFAFVTAVRKFFAGPLVLAGAISNGRLIHVAEELGADFAYVGTPFIAATESMAADDYRQMLIDSNADDIQLTAEVTGLPANMLRKSLERSGFRPEPKHDGFNLLKEIETLKAWRDIWSAGQGVGDVERVEPAAGVIDRMTHDYDAARAASQQRAARRFASVGSQ

SEQ ID NO: 14510 - protein, 210 aa, BradyrhizobiumColbertium
MVVSGRDRQLAAWNDTVQTRDQQFNLKRTALLKEAARAFSSQGYHATSLDDVAKTLGVTKPALYYYIKNKQEILFECHMLSQDLGDRAFEHAYKTGRNGREILLSFAKEFIESHNSEIGDCAVLVEFQALDPANRKIVAARRDKAQHQMQAIIEKGMADGSIRQVDPKLTVFFFMGAVNWMARWFDKDGPKSGAEIAKVFTDLLDHAVSP

SEQ ID NO: 14511 - protein, 386 aa, BradyrhizobiumColbertium
MNKHFSDTGSEPFLSEQQRMVRNTARQLGRDVLAPTAAERDSTSAWPTEELRVLGAQGFMGMTVSEEYGGSASGFLAYCLAIEELSAADGGVGTIVHVHNLGAAHVIAKNGTAEQKQRLLPALASGDKIGAFLITEPQAGSETSALRTSARRDGDDFVINGTKQFISNGSEAGVAIIVARTDPGAGKRGFTTFLVEPPAKGYIVSRIEEKLGQRTAHTAQIQLDDLRVPKENILGTLDCGYGIMMSGLSDGRIAIAAQAVGIAQAALEAAIHYAREREVAGKPIMELQGVSFALADMAAQVDIARQYYIHAARLLEAGLPCMKEAAIAKLFASEMAEKVCSEALQIHGGYGYLRDFPVERYCRDVRVCKIYEGTSNIQKLIIARNL

SEQ ID NO: 14512 - protein, 119 aa, BradyrhizobiumColbertium
MAAEPPSTTPSWSMSCAARSSEAAAQRAEPKVAAVFASRARQIDIAKATMPPDGCQFVIHAKALPGNRYDGHALATVIPEIEALIGNTIARILLDKGYRATTPRRITSSGCLRQARSGG

SEQ ID NO: 14513 - protein, 43 aa, BradyrhizobiumColbertium
MFRADRSGRGVGLVIPTLLTWPGSLSCSRYQRREIKGENWNLT

SEQ ID NO: 14514 - protein, 63 aa, BradyrhizobiumColbertium
MSIRPIKTHHTFEVISDQIRDEARSGVLGMGDRLPNERDMAKALAVSRHALRRSAARLGISGR

SEQ ID NO: 14515 - protein, 66 aa, BradyrhizobiumColbertium
MSAQAYPSKPITWLIPFPAGGPTDVLARAVAPKLSEALDVTVIVENPPGAGGGTAMVSLAKAKPDG

SEQ ID NO: 14516 - protein, 349 aa, BradyrhizobiumColbertium
MYFPTRYEDIRQIAYDTEHFSSRRVQVRETPPPVKSPAPPITSDPPHHRAARMVLLPQFTPEAINKLIPTTRMICNDLIDRFIGDETCDAAVDFAQHIPVRVIAGMLGLPPSDGEMFRGWVHGLVEEAILDDATMVRTLSEMTAYLLDHVEQRRRSPADDLISYLAADRIDGAPLTDNHILGTLRLLLIAGIDTTWSGIGACLWHLAKTPADRRRLVAEPALMQTAIEEFLRAYSPVTMARLVAKDTVVGGCPYEKGQMVLLSFPAANRDPAVFPDADKVIIDRKANRHAAFGLGIHRCVGSNLARMELTVAVEEFLKRIPEFHLADSKAVTWSEGAVRGPRKLPLLLG

SEQ ID NO: 14517 - protein, 378 aa, BradyrhizobiumColbertium
MKTALCKKLGIEFPLFAFSHCRDVVAEVTNAGGCGVLGAVGHTPESLKIELDWIDSRVKGRPYGIDLLIPNKMEDKQGDLAEAELQSRIPDGHRKFVNSLLERHGIDTSDLWSGEYDKRTADSMREAGAAKLLDVAFQHPIKLFVNALGVPPKSIMERARSKGILVGALTGAKEHAIKHAEAGVDILVAAGTEAGGHCGEVSTMVLVPEVLQAIEPYENIDVLAAGGIATGRQMAACMAMGAAGVWCGSVWLTTVEAETTPTVKQKMLKATSRNTVRSRSRTGKPTRQLQSAWSDAWGAKDAPEPLAMPLQGLLSRPPMAKVDKLAESGHDGAKNLAAYFVGQAVGLMNTEQSARSVVADFMKDYAEAVERLSGTLHE

SEQ ID NO: 14518 - protein, 41 aa, BradyrhizobiumColbertium
MLRRVAKNHPILQHARHYLDLFSHLSGHVATKGVNFSTEKR

SEQ ID NO: 14519 - protein, 461 aa, BradyrhizobiumColbertium
MSKTLTEAQITTAKARSRLELGVHWRRLDAEAHLGYRKGKRGGVWLVRWRNHHEGGNYKQAQVGITNDINDKRAEGILTFEQAVRTAREAVARARTEAASQAAGPAPTVRSAVESYIKERDARERRRTGRDVRSDAGTKLRRYVLGQEKRGNQEAAGAAPLASVQLHALKEDDLITWREGLPKDLKVTTKQRFVNDLKAALNAAWPRLSADRKKLNPTFLAIVKAGFKAERVDDDDHVSVARDNQILTDEEVGAILQAACEVDQEQGFDGDLYRIVVCLAATGARYAQVRRMRVGDVQVSARRLMVPGSYKGRGGNSGSDPVPVGDDVIEVLLPAIAGRPSDAPLFERWIHEQEPSGIAWKKSERGPWKRGELARPWKAIRQRAGMPEVIPYALRHSSIVRGLRKGLPIQQVAKLHNTSVKMIERHYAKYIATALEDLARAAVVSLVPRSDGNVVPIGKRA

SEQ ID NO: 14520 - protein, 202 aa, BradyrhizobiumColbertium
MPRPREFDEQAAIAAATDRFWRFGYEATSIRDLSGAMGITGASLYNAFKSKRNLFSIALKHYKDQTVCDRMERFEASLPPKQAILAFFREIISRSCEDKSRKGCFLVNSALEVAPHDPAFARIVEGILEEVEAFFYRCIVAGQKNGTINSSISATDVSRLLLGTLLGLRVLARARPDRNVLRGVVRPAVSLLDVNRSKERGS

SEQ ID NO: 14521 - protein, 310 aa, BradyrhizobiumColbertium
MRPGSDRDKSGLSPDKVENIWGVSALASGLGSDGFGAALWPVEHGVVERPACASTHVVSVWTSGSTISELYLDGNLRFRRIRRRGTFQLARAGEDVRVILSETSGTCLDLYVPKKLLDSAASEELGLGSYSVELLPLKLETDGVITRVADAVAREILNPGTATRLAMDSAVMQLGVSLIRNWSTLGKNVRVGGSGLNPAQVRKTLSYLQDTLHLDISLESLAGRLGLSTFHFAREFKIAVGMPPHRYQMQLRLTKARELIQNTRMSVAEVAKAVGYRDPGFFSRAFRREFGLAPGAFRRSYLASDHEAGS

SEQ ID NO: 14522 - protein, 120 aa, BradyrhizobiumColbertium
MIGGYIDGGKADLWLTAELAGVPIGFAFCEPERMTNGTWNLLAIGVTPERQGQMVGARLVKRLEDNLRAAGHRILLVETLGTAEFARTRAFYLANGFTEQARIPEFYDVGGDKVVFWKRL

SEQ ID NO: 14523 - protein, 60 aa, BradyrhizobiumColbertium
MADVVLFDPEEVHAVLTNVRDRAGAVVRHLGPELPAAATLLLFLDRRVIAGMRTRRRFCR

SEQ ID NO: 14524 - protein, 44 aa, BradyrhizobiumColbertium
MLKGEPSSRALIMAFRINDLSPSIREAGQRVGTRLRFSFLEIRS

SEQ ID NO: 14525 - protein, 65 aa, BradyrhizobiumColbertium
MIKALDDGSPLSIFLIDIDHFKRFNDSHGHQVGDRVLRLVADCVRQSIGKADLVLQGVTVVRVIG

SEQ ID NO: 14526 - protein, 61 aa, BradyrhizobiumColbertium
MRPKKPKATGSGDLFRARLDQIINMKHELVQLAGKVEWDWIDGGSRRSAARTVGRASRPAS

SEQ ID NO: 14527 - protein, 48 aa, BradyrhizobiumColbertium
MSRNRAAKQFGFAISTVVGWMKRSMRPAASPGQIGGYKPKAISGEQAV

SEQ ID NO: 14528 - protein, 1167 aa, BradyrhizobiumColbertium
MPSAGFVHLHVHSAYSLLKGSIKIAKLAELAKKDHQPALALTDTDNLFGALEFSDKMAGSGIQPIVGCDLAIDFADQDPNARNAMGPSRVVLLAAQERGYRSLMRLNSRAFLESPDSHAPFIKFDWLEGETEGLIALTGGPDGPISLALAGGLSELAALRCERLAGLFGDRLYVELQRHNTEKERRVESGLIDIAYAKGLPLVATNEPYFAATDDYEAHDALLCIAGGRLIAETEREQLTPDHRFKTRAEMALLFADIPEALASTVEIAERCSFRPMTRKPILPFFTVGAASSSDAAAVEAAELKRQAEEGLAKRLRVHGLSQGTTEETYAKRLAFELDVITRMKYAGYFLIVSDFIKWAKSQGIPVGPGRGSGAGSLVAWALTITDLDPIKFGLLFERFLNPERVSMPDFDIDFCQDRRGEVISYVQQRYGRDQVAQIITFGTLQARGVLRDVGRVLQMPYGQVDKLTKLVPQNPAAPVTLAAAIESEPKLQAFRDEDPVVARAFDIAQRLEGLTRHASTHAAGIVIGDRPLSELVPLYRDPKSDMPVTQFNMKWVEPAGLVKFDFLGLKTLTVLDVACKLLKPRGIHVDLATLPIDDAESYAMLARGDVVGVFQVESQGMRRALIDMRPDRFEDIIALVALYRPGPMANIPTYCARKHGDEEPEYLHPVLEPILKETFGVIIYQEQVMQIAQVMSGYSLGDADLLRRAMGKKIRAEMDKQRDIFVAGAVKNGVPKGQAETIFELLAKFADYGFNKSHAAAYALVSYHTAYMKAHYPVEFIAASMTLDLNNTDKLSEFRSEAQRLGIKVEPPNINRSGATFEVGEKTIYYALAALKGVGIQAIEQIIEERTKRGLFTSLADFAARVNPRAINKRIIESLAAAGAFDTLEPNRARVFAGADSILAACQRAHQAETIGQNDMFGMSADAPTIMLPQVEPWLPAERLRREYDAIGFFLSGHPLDDYATVLKRLRVQSWAEFSRAVKTGATAGKVAATVVSRMERRTKTGNKMGIMGLSDPTGHFEAVLFSEGLAQYRDVLEPGAAVLLQLGAELQGEDVRARVLHAEPLDDAAAKTQKGLRIFLRDTKPLDSIAKRLAGPDMAGSNGSAPKPGSPAMAPRSNGDGEISLVMMLDLETEVEMKLPGRFKVSPQIAGAIKAVAGVVDVQQL

SEQ ID NO: 14529 - protein, 250 aa, BradyrhizobiumColbertium
MCDKCSENLHQAVAPSRRAMMLFAGSALAAAAFGGSALAKEAKEAKAPPKPQNVLSPDAALKRLMEGNARYVSGVSRRHDFKHEREALVGGQNPYAAVLSCADSRIAPEYAFDSGRGDLFVCRVAGNFAGDETVASMEYTVAVLGTPLILVLGHDNCGAVDATIKSLKDDKPLPGHIPSLVAAIAPAVKTAAQQSGNALDNAIRQNVMDNVAKLKSAAPILNAAVEQGKLKVVGGIYRLSTGAVDLLTQG

SEQ ID NO: 14530 - protein, 175 aa, BradyrhizobiumColbertium
MLRRAALLLAVGAMLVGCVSNQVGTDFASVSQKVGPPRVGHSRIVLLQDKRNGLSMQVCACEVKLDGAPLGKVVAGKYAFADRPAGRHELLVTELMFPGDTKREIVMEAGRTHFYLIKSSARHDAATGGAILGGLAGLAVVSIATAGEANPGPAELVALDEATARTKLAELQAVE

SEQ ID NO: 14531 - protein, 881 aa, BradyrhizobiumColbertium
MRGTLRTFICLLLPIVALAAGAPETARAQQPEKRIALVVGNGAYAKAPLATTANDAGLIAQTLQAAGFDVIGARDLDGDTLRKSLRDFIQKAQASGPGTVAMIYLAGYGVQLAGENYFIPVDSSIARDTDVPTEALRISDYARQLASIPLKANIVVLDAARAQPFIEGGQHIASGLALVEPEANMLIAFNAAPPCRAPEEPGPYGIYAQSLAEMIRTGGLPLPEVFDRVRLRVNEASKGAQVPWNEQKISAQFSFFERGPDAPPETAPDQVAAIRNKPIRDLGVQDAYAAALERDTLAAYEEFLAAYPNDPLAKRVRAIVAARREALTWRRTYRADTPDAYWSYLRRYPRGPHAGDARRRLAILTAPLEPPPTFTMLDYDVPPPPPEEVFYVDRPVLYFSDPDFGFVPPPPPPVYYLPPPPPDFVVLPPPLPVVGLFVLPQPVFVPIPVFVRAPVYVAPPPNNIIYQNIHNTTVINTVINRPPPPPAAGPALGPGNLAPAVAGRATPAGPAVPQAVAQRAALIQQGKAPMPPSATIQPTVRPAIAAPAPANVAPGTTAQPPAAATPQANTLTAPGTSGVPPAGPGAAPGNVPPNGRPGSTATAPAGNVPATPQATAPAKLPQANTLPVPGTPGGPPPPARAGGAPGAAPPHGRPAATVTAPAGNIPAAQPNAATAAAPNPPPAPRGAASPSAGLPKPPATINPPASELRGRAPGSQPVAAPPSSAASGKPAVPPTARIAPPPPPVAARGPSGVQDHRPAPPQAARPAAPPPHPQALAKPTPPPPPRVAPPPPPRAAPPPAAVARPAPPPPIARPAPPPPAMARPAPSPPPMARPAPPPPPVARPAPPPMAAAPPRAAPPPPPPARPAGPAPKSCPPGQPRC

SEQ ID NO: 14532 - protein, 331 aa, BradyrhizobiumColbertium
MALPDFTMRQLLEAGVHFGHQAHRWNPKMAPFIFGTRNNIHIVDLAQTVPMLHQALQAVSDTVAKGGRILFVGTKRQAQDGVADAAKRCAQYFVNSRWLGGTLTNWKTISASIKRLRHLDDVLSGGEANSYTKKERLTLQRERDKLDRSLGGIKDMGGLPDLIFVIDTNKEDIAIQEAQRLNIPVAAIVDTNSDPKGITYVVPGNDDAGRAISLYCDLIARAAIDGISRAQGDSGIDIGASAQPVAEELPAASSSGFQGLAGPRGTADDLKKLPGVSGAIEKKFNDLGIFHYWQLAELDHDTAHTIGEEVGLPSRADAWVAKAKALTAEAE

SEQ ID NO: 14533 - protein, 307 aa, BradyrhizobiumColbertium
MATITAAMVKDLRESTGAGMMDCKAALTENDGNMEAAQDWLRKKGLSKAAKKSGRVAAEGLIGALTKGTKGVVVEVNSETDFVARNGQFQGLVKMIAQVAFDVGADVEKIKAAKVGDVTIDTAINDAIATIGENMTLRRAAQLEVSQGVVSHYVHGAVIEGAGKMGVLVALESPGKADELAALGRQIAMHVAAANPLALDPSGLDPAVVKREKDVLADKYRQQGKPENVIEKIVESGLKTYYKEVCLLEQAFIHDTGKSVAQAVKEAEGKVGGAVKIAGFVRYALGEGIEKQESDFAAEVAAASGKK

SEQ ID NO: 14534 - protein, 238 aa, BradyrhizobiumColbertium
MTDPVYRRVVIKLSGEYLAGQQGFGIDQPTVDRVADDLIAARHLGTEVAVVIGGGNMVRGVEVSSRGVTRTTGDTMGMLATMMNCLALEAAIERKGTPARTLSAFVMPEISELFTRTAAHKYLAEGRILLLGGGTGNPFFTTDTTAVLRAAEIGAQAVLKATNVDGVYSADPKKDPTATRFDRLTHSQAIEGGYKVMDATAFALARETSLPIIVFSIAEPGSIGAMLRGVGHGTIVAG

SEQ ID NO: 14535 - protein, 187 aa, BradyrhizobiumColbertium
MATGNFDLNEVKRRMQGAVQSLKHELGGLRTGRASASMLDPVQVEAYGSHMPLNQLATVSVPEPRLISVQVWDKSMVKAVEKAIVDSNLGLSPATEGQVLRLRIPELNEERRKELVKVAHKYAEAAKVAARHVRRDGLDVLKKLEKNHEMSEDDQKRHADEVQKATDGTIAEIDQLLAIKEKEILTV

SEQ ID NO: 14536 - protein, 252 aa, BradyrhizobiumColbertium
MSNAAAPATEGPDRSEAPAHVAIIMDGNGRWAAARGLPRAEGHRRGVDALRRVVRASHELGIRYLTIFSFSSENWSRPASEIGDLFGLLRRFIRNDLASLHRDGVKVRIIGERDGLESDICALLNEAEELTRDNTRLTLVVAFNYGSRQEIAKAAQKLAREVAEGKRDPATIDAETLGAYLDAPDIPDPDLIIRTSGEQRLSNFLMWQAAYSELVFVPIHWPDFDKAALESAIAEFARRERRFGGLVAKTAS

SEQ ID NO: 14537 - protein, 280 aa, BradyrhizobiumColbertium
MSEPDAASAGAKPAPSNLVVRVLAALVLAPLTIAIAYAGGWLWALLVTLVSIGLFAEWLMVVGAGSAALTGAGTVVIAMMGAAVAFGALKTAVITGLIGGAIVTLIARGKFLWAATGFAYAAAALLAAILVRKDLVNGFSALMFVLLVVWATDIGGYFAGRSIGGPKLWPRVSPKKTWAGAFGGFGASLLVAVGFAVFGFGKMGPLLLVSAVLSVVSALGDLFESAVKRRFGVKDSSHLIPGHGGLMDRLDGFVAAILAAWIIGFLRHGVHSAGSGLMVW

SEQ ID NO: 14538 - protein, 402 aa, BradyrhizobiumColbertium
MRNNRLAASDVRSVTVLGATGSIGDSTMDLLRATPERYRVEALTANGNVAALAKLAKEFSARYVAIADTSKLAELKAALAGTSTECGAGESAVIEAGARPADWVMAAVSGAAGLKPALAAVDRGAHVALANKECLVCAGDFFMQRAAKAGACILPADSEHNALFQALSSGNRDELVRVIITASGGPFRTWKPADIEQATLAQALKHPNWSMGQKITIDSASMMNKGLEVIEASYLFALSPDEIDVLVHPQSIIHGMVEFSDCSVVAQLGAPDMRTPIAHCLGWPDRIKGPAAKLDLAKIGQLTFEAPDFERFPGLRLAYDSLRTGKGATTVYNAANEVAVAAFIAGKIRFGAIARLVEATLEDWIKGGNQAPLTSADDAISVDHVARNRAAALLPQIALKAS

SEQ ID NO: 14539 - protein, 383 aa, BradyrhizobiumColbertium
MIDFFVHSFNTLSHGLLGYAVPFLFVLTIVVFFHELGHFLVARWAGVRVLTFSLGFGPELVGFNDRHGTRWKISAIPLGGYVKFFGDESEASTPSAQTLSSMTAEERAGSFHHKKVGPRAAIVAAGPIANFILGALIFAGMALYYGKPSTIARVDGVVATGAAAAAGFKVGDVVLQIDGKPIESFADMQRIVAMNAGSALTFQVKRDDAIVTLTATPALLERKDPFGNSHRLGVLGIEHKSQAGEASTAPVGIGEALKIGVEQVWFIITSTFKFLGSLFVGQGNPNEVSGVLGIAKMSGQAASAGFQFVINLCAVLSVSIGLLNLFPIPLLDGGHLMFYAAEVLRGRPLSERTQEMGFRIGLGLVLMLMVFATYNDILRMAAS

SEQ ID NO: 14540 - protein, 831 aa, BradyrhizobiumColbertium
MLATLIMFGAPVIAPVGAVFLSSSALAQSVQSISVEGNRRVEVETIRSYFRPGPGGRLDQGAIDDGLKALIETGLFQDVRINRGPGGQIIVSVVENPVIGRIAFEGNKKIKDEQLSAEVQSKARGTFSRAMVQSDTLRIAEIYRRSGRYDVRVTPEIIEQPNNRVDLIFTIEEGAKTGVKSIEFVGNNAFSSYRLRDVIKTRESNLLSFLASGDIYDPDRVEADRDLIRRFYLKNGFADVQVVAALTEYDPEKKGFNVTFKIEEGAQYRVGTVDFRSSIPNFDPASMRAYSRVNVGSLYNVESVEKSVEEMQIEASRRGYAFAVVRPGGDRNFEAHTVSVVFNIDEGPRTYIERINLRGNTRTRDYVIRREFDISEGDAYNRALVDRAERRLKNLDYFKTVKITTEPGSSSDRVILNVDMEEKSTGDFSISGGYSTTDGALAEVSVSERNLLGRGLFAKASVTYGQYARGYSLSFVEPYLLDYRVALGLDLYQRQQLSNSYISYGTKTLGFSPRLGFSLREDLALQVRYSIYQQEITLPYYLANCNNVVGSAAFNPSPAFSAATGIPLDPSTNGLGCYNDGEASLPVRRELANGKTLTSALGYTLTYNTLDNNKNPTDGLLVDFRQDFAGVGGDVSYLKSVIDAKYYTPLVSDIVGIVRLQSGMLNKIGSDLRMLDHFQMGPNLVRGFAPNGIGPRDLNPYGSRDALGGTQYWGASLELQMPFWFLPKEVGLKGAVYADAGGLYDYRGPTSWTTTNEVNAPGCIPSTIDPASSGTCTGLVYDDSKVVRSSVGVGLIWQSPFGPLRFDYAVPLSKGKYDRVQEFRFGGGTTF

SEQ ID NO: 14541 - protein, 355 aa, BradyrhizobiumColbertium
MAQSIFFTKPPATALAEIATLTKAQLVDPARGGHVITGLASLDEAGPMHLAFFDNLKYADQLRATRAGACLVSPRFEAEVPAHVAVLRVAQPFRAFVRIAREWHGDALRPQSWVGNDGIAPSAIIDPTARLEDGVVVDPLAVIGPDVEIGSGTVIGVGAVIGPGVKIGRDCNVGARTAIQCALIGNNVLIHPGCSIGQDGYGFIFFGPEGHLKVPQTGRVLIQNDVEVGANTTIDRGSLRDTVIGEGTKIDNQVQIGHNVTIGRHCLLAAQIGLAGSLTIGDNVALGAKVGINNHLKIGDGAQVTAMSAVKDDIPPGGRWGGHFAKPTKQWFKEIIAVERLVRDSKAEPKDEGRE

SEQ ID NO: 14542 - protein, 153 aa, BradyrhizobiumColbertium
MTAESPVKFELVDINAILQTLPHRFPMLLIDRVINIRADYSGIGIKNVTFNEPAFQGHFPERPVYPGVMMIEAMAQTAGVIGIKSVEGTEKPRAVYFLTIDKCKFRKPVLPGDTIEYHMRSLGRRKAMWWFHGDAKVNGQVVAEADVGAMLTD

SEQ ID NO: 14543 - protein, 114 aa, BradyrhizobiumColbertium
MVRALVLLLAQLAGTPIVSETIETGEQRIVDLVTFECRDITRSTVLQRVCYDRAQQDLIVASNGAYVRYCGVAADTVERLMGAPSMGQFFSRNIKREATTGRYTCRTREPVQKS

SEQ ID NO: 14544 - protein, 263 aa, BradyrhizobiumColbertium
MSKIDPTARVADGAVIGEGTEIGPYCIIGPNVAIGKNCKLIGHVHITAQTTIGDDCTIYPFASLGTPPQSLGYRGELTQLRIGAGCTIRESVTMNAGTVAGGGVTTVGDRGYFMNCSHVGHDCHVGNDVIFATSATLGGHCEIGDFVFIGGLSAVHQFTRIGSQVMVGGVCGVRDDIIPFGLVNGQYAVLEGLNLIGMKRRKFTKQRLATVRAFYQKLFHGSGTFAERLEAARPLAGEDPAIAEILDFIGKGKRPLCLPAIAK

SEQ ID NO: 14545 - protein, 289 aa, BradyrhizobiumColbertium
MAAGMTSAAPEVSSPVGIVAGGGAMPFAVAESLAARGITPVLFPLRGACDPARVEQFRHRWISVGQLGRAMRLFRQEGCRDLIFIGTLVRPSLAEIRFDIKTLRLLGNVIRAFRGGDDHLLSGVGRMLEQDGFRMVGIKDVAPDLLMPEGCISRAWPSDTSKADIERGRAVLTALGPFDIGQAVVVIDGHVVAVEDIEGTDALLARVARLREEGRIRAATGRGVLVKAPKSGQDLRFDLPTIGPRTIEGVAAAGLAGIAVSAGNTIAAEPQAMIALADAKYLFVIGLSA

SEQ ID NO: 14546 - protein, 398 aa, BradyrhizobiumColbertium
MQSRDPKRKIFLIATEESGDRLGSSLMKVLRQRLGDGVQFVGVGGRTMAREGLATLFPIEELSIVGFAAVVQQLPKILRLIRKTADAVTDAAPDALVIIDSPDFTHRVARRVRSRSPEIPIVDYVSPQLWAWRPGRARTMLSYVDHVLGLLPFEPEEYRKLGGPPCSYVGHPLIEQLASLRPTAEEQTRRDGEPPVLLVLPGSRRSEIRHHLDVFGAALGRLQAEGRAFELMLPTMPHLEPTIREGIANWPVKPQLVIGENEKRAAFRIARAALAKSGTVTLELALSGIPMVTAYRVGAIEAFILRRAIRVSSVILANLVIGKDIIPEFLQEDCTPDKLAPALAELLMDSPLRRRQVEAFAQLDQIMSTGNTSPSVLAADIVLAAMRKGVRTGSGVSS

SEQ ID NO: 14547 - protein, 346 aa, BradyrhizobiumColbertium
MSDQNSKFNRRNVLMGSVATLATPSIIGSAHAQEKVSWKVQSHWPKASGSFNDSLVVLQKELEERTGGRFKMELYGAGEIAKDREIFNVVRKGVVQMGTISPAYILGEAQAMGLYYGVPGTLRETWELMHLTKNLGIEKMVNDELRPKGVILLGEKAYPTEIVLKKKITSAADLGTLKVRSAGTMLDYLSAAGTSPQQVAGPEIYQAISTGVVDGAHWGAAIGALSMKFWEVAPYHMKPALGVTNDCWIISTAALDKLPADLRLQFLALIEERYFRRSVEYLHKEAIALTTGKTKMNVEVVRFPDDVLKKFADASKGILQKEIAKGPVASKGGEALTTLMTDLGYV

SEQ ID NO: 14548 - protein, 180 aa, BradyrhizobiumColbertium
MLKLARTVTHLNIWIGKVAAWLIAPMFLLLMTDVIMRYVVGSAAIWTAEFAQLIFGGYAVIAGGYLLVERAHVNVDIIYGKFSRVNKAVVDLATSFLFFLFLGVLIWQGVDMAWDSAAKFERSSSLWNPHIWPVKIIIPVAGVLLLLQGLVRFASDIRTVKGLENDPDTFGKQATDEPSH

SEQ ID NO: 14549 - protein, 440 aa, BradyrhizobiumColbertium
MSVELLTLLFFGSLLVFLFIGTPLTFTLGGISVVFLYFTMGPVGFYIVASKFWDSMMSFTLIAIPMYVYMAMLLEKSGVANDLYRMMHLWFGGFRGGLAIGTVAICAIFAAMSGISGAAVVTMGTIALPRMLERGYDKRLAVGAINCGGGWGILIPPSILMVLYALLTEVSVGRLFASGIGPGILLFVLVSIYIGVRAWLQPSLAPALPIQERGDWQTKFASLKAVFLPLFIVFLVLGAIFGGFATPTEAAALGVFGALIASAVHRRLSMAVLNDAAIQTLRLTALIMWILFAAHAFSTAYTTLGASELMNHLMTLVPGGKWGALAFMLFVLLILGMVLDPVGIMLITLPVFLPVVQAYNFDPIWFGVIFIIMMEIGYMTPPFGFNLFYLKSVAPPEVTMGDIYWSVIPYVLVTMVGVLILIVFPDIALYFPNLFFGVAR

SEQ ID NO: 14550 - protein, 97 aa, BradyrhizobiumColbertium
MPKGARVGASAVRRGPTTLPPWSCSSPPGTAIASPVSIFGAMRVSPRACTRIRLGFALRDGDVADIDPGRDQGDLRSMVSWGAKWAGVATDVCPPKS

SEQ ID NO: 14551 - protein, 433 aa, BradyrhizobiumColbertium
MDAKPSNKTATLTVGNKSYDLPILSGSVGPDVVDIGKLYGQSGLFTYDPGFTSTASCQSKITYIDGDAGVLEYRGYPIEQLAEHGDFLETCYLLLYGNLPTAAQKKDFDHRVTHHTMVHEQMARFFQGFRRDAHPMAIMVAAVGALAAFYHDSTDINDPQQRMIASMRMIAKIPTLAAMAYKYTVGQPFVYPKNSLGFAENFLNMCFAVPCEDYKVSPVLADALEKIFILHADHEQNASTSTVRIAGSSGANPFACIAAGIACLWGPAHGGANEAALNMLYQIGTVDKIPEFIAKVKDKSSEVRLMGFGHRVYKNYDPRAKIMQKMCHAVLKETGHGDDPMLKVAMELEKIALSDQYFIDRKLYPNVDFYSGITLKAMGFPVSMFTVLFAVARTVGWISQWSEMIEDPQQKIGRPRQLYTGVTKRDYVPIDKR

SEQ ID NO: 14552 - protein, 47 aa, BradyrhizobiumColbertium
MCGETGRSRRPLGRSWGQAGSSRMYGEMGILLLCALQDRRAHGRLTS

SEQ ID NO: 14553 - protein, 475 aa, BradyrhizobiumColbertium
MSDSVVTRFAPSPTGFLHIGGARTALFNWLYAKKHGGKMLLRIEDTDRERSTEAAIAAILDGLKWLELGWDGDVIYQFARAARHREVAEQLLADGKAYRCYATAEELAAMREKARAEGRTRLYDGMWRDRDPATAPSDVKPTIRLRAPQTGETVIEDQVQGRVVWQNENLDDLVLLRGDGNPTYMLAVVVDDHDMGVTHVIRGDDHLINAARQKQIYDAMGWTLPSMSHIPLIHGPDGSKLSKRHGALGVDAYRAMGYLPAALRNYLVRLGWSHGDQEIFSTEEMIAAFDLASVGRAAARFDFAKLENLNGHYIRHADDQSLVRMFEDVLDHVVPSRDEIKAKLNETTRAQLLKAMPALKERAKTLIELIDGAHFIFADRPLTPDPKAQALLTQDNRRLIGRLHSALEKVETWSGPTTEAALRAFAEENGLKLGAVAQPLRAALTGRTTSPGIFEVLDVLGRQESLDRLKDQSTT

SEQ ID NO: 14554 - protein, 558 aa, BradyrhizobiumColbertium
MTEPVAAEVGRDFIRDIIQADLEQGKYKEIVTRFPPEPNGYLHIGHAKSIALNFGIAQEFPGRCHLRFDDTNPVKEEQEYIDSIQADVRWLGFDWGKNLFYASDYFDRLYEWAEQLIRDGLAYVDDQSQEEIRLSRGTLTEPGKNSPFRDRSVEENLDLFRRMKAGEFPNGARVLRAKIDMAAGNINLRDPVLYRILHAHHPRTGTKWSIYPSYDYAHGQSDAIEGITHSICTLEFEDHRPLYEWFIEKLPVPSKPHQYEFARLNLTYTLLSKRVLTQLVRDGHVAGWDDPRMPTMAGMRRRGVPPAALREFVRRIGVAKANSVVDVGMLEFCIREELNRTAQRRMAVLRPLKVVIENYPEGQTEELEAINHPDDASAGTRKITFGRELYIEQDDFMENPPKKFFRLSPGNEVRLRYAYFVKCTGVIKNDKGEVVELRCTYDPATKGGNAPDGRKVKATMHWLPAATSMPAEIRIYNQLFANPTPDASNFAADLNPNSLQILSDARVEASVAESNSTEPMQFERQGYFVRDKDSTPGKPVFSRTIGLRDTFAKEVAKG

SEQ ID NO: 14555 - protein, 128 aa, BradyrhizobiumColbertium
MSSEAGEIVSAIISKWCAGFAKLDASALSSLYSKNAFFFGSNPKLYRGRDGVADYFNGLPRWRKPSAAFSDVQAAQSGPDLINMAATISFDLAGERADLMVKMSWVIVREDGDWKIVNHHASSQAPLI

SEQ ID NO: 14556 - protein, 754 aa, BradyrhizobiumColbertium
MRSQGVAGTWPVGRVAPAGGFAPADLGLWPAIVETLRRWARAEAGPGRLLPWVPVAFGGGIALYFAADHEPVLWVVATTAAALMLGAVLLRRSRLFAPAIMIAAVAAGFAVATWKTARVAHTVLAKPLYSVSLSGFVEARDIRERTDRFVLRVTAMEAQRSDIKLERVRLSVRKGTAPEVGSFVQLKARLLPPISPVRPGSYDFSRDMFFQGIGASGFVMGTITASTPPDAGGLRLRYAAFMQGLRDAIDGRIRATLEGDNRAIATALLTGRRDAITAPVNDAMFVSGLGHVLSISGYHMAVVAGVVFFAVRALLALIPGLAAGFAIKKWSAAAALVAAAFYLLLSGAEVATQRSFFMTAVVLIAVMVDRRAITFRTLAVAALIVLAVAPEALVHPSFQMSFAATLGLVALVQIGMPNLLASPDHSATARIALWGGREIAILFLASLIAGLATTPYAAFHFHRVTPYGVLANLGAMPVVSALVMPAGLLGLLAAPFGLDGVFWWLMGIGIDWMVAVSRWVEALPGAVGRIPAFGIAPLIAASLGVIVMGLLRTPLRWSGALVLFAAIIWGLSVRQPDILIAGDGASVAVRGRDGHLHVIRASRDGFLLKQWLAADGDPRDAGSASLADGVSCDASGCVTALADGRLVALSLRIDALADDCSRAALVVTARPVPPDCAAMVIDRPRLASQGALALTRSGEGFSVQAVRARSASRPWLPAGAGEGDFDGSLAPKTALPRNRDATPSDADLQADDGG

SEQ ID NO: 14557 - protein, 144 aa, BradyrhizobiumColbertium
MCDYSLHAIATRPAEVGETIVTTTFRGTSTRGFASEADLSVAVCLLPGTELAFADNVRYDNRWIWTRTVNSRVGKFGKIDPHIPDRHHDAIEFPDGKSVLVTQLVEGQRATVLQLPVTQTIGEREHKPQIAAGTRSTITRLPID

SEQ ID NO: 14558 - protein, 265 aa, BradyrhizobiumColbertium
MSVHDLFRDVAALSPKFIVSESNDINRGTLVEMLTRKQYELLRFISERLKESGVPPSFDEMKDALDLRSKSGIHRLITALEERGFIRRLPNRARAIEVIKLPELQAAAGSRRGFTPSVIEGNLGRIRPTSSPPADEGERPVAVPVMGRIAAGTPIEALQTRSHTISVPPDMLGSGEHYALEVRGDSMVEAGILDGDMALIQRNESANTGDIVVALIDDEEATLKRFRRRGASIALEPANAAYEVRILPPNRVKIQGKLIGLYRKY

SEQ ID NO: 14559 - protein, 403 aa, BradyrhizobiumColbertium
MALMPVSDALAAVLAGAEPLAEETVSLEGAYHRVLARDVAARRTQPPEAMSAMDGYAVRAADAATIDSRLTVTGEVAAGRPFAGRVGVGEAVRIFTGGVVPDGADAVVIQEDTIAEGKLITIKEAAIPGRHIRPAGVDFREGDVLLRKGTRLTERDLALAAAMNHPQLAVCRRPKVAILATGDELVAPGSTPGPGQIVYSNGYALHALARSEGAETIDLGVAADTLESTSAGIRRARESGADILITTGGASVGDHDLVQQALRDEGISMAFWKIAIRPGKPMMHGRLGAMRVIGLPGNPVSSYVCAFLFMVPLIRALSGRSMIHHQREHAVLGRDLAANDQREDYLRARLELRDDGALVAVPVSHQDSSLLANLAAAQLLLVRAPFAPKAEAGTPCVVLRLPA

SEQ ID NO: 14560 - protein, 68 aa, BradyrhizobiumColbertium
MLGKTYLTRQASLLLEFARTTSDSELSAKLISKAADLKSQADPLPDKDQGPKAPDVASNDGWGRPSGS

SEQ ID NO: 14561 - protein, 207 aa, BradyrhizobiumColbertium
MTSLSPGSADALLFDLGRVVLDIDFSKAIACWAGHAGCQPEAIVARYVRDEAYRLHEIGKISDEDYFASLRASLGIGISDAQFLEGWNAIFAGEMPDIAELMPRAAKLMPLYAFSNTNRPHVDYFSKEYASVLGHFRELYLSSSIGLRKPDAEAFDHVVAAIGVPAERIVFFDDLAENIEGARARGLTAVHVTSPRDVGNALRALGI

SEQ ID NO: 14562 - protein, 377 aa, BradyrhizobiumColbertium
MNEAPRIQPDRNVELGASNEPFQNLHEFIRKARANLNQNAWDYIVGAAETETTMRRNRMALDEIAFRPRVLRDVRKVDGGVDQFGRRMRLPVVLAPVGALEIFDPDGAASVARAAGAFGAAHMLSSVSEPGLEKTAEAAPDALRLYQLYVRGDDAVVADVVSRAEKNAYAAFCLTVDTAHYSRRERDIAKRYVRESRLRATGGDFQKGLEWRTVKMIKDKFEIPLILKGIATAEDALIALDHGVDWIYVSNHGGRQLDHGRGAMHVLPEIVDAVKGRAKIMVDGGFGRGTDIVKAIAAGADLVGIGRLQCWALAAAGEAGVARMLELLEDEVLRCLGLLGATSFAEVDKSCLHPATATNAPSVFSAFPLFDHEPYRY

SEQ ID NO: 14563 - protein, 445 aa, BradyrhizobiumColbertium
MRKSLLFPLGALTGACLTLLVASPHGSVWAARAAAGANDAYSQLNLFGAVFERVKASYVEKPDNAKLIEGAITGMVTSLDPHSRYMNAKAWTEMQETTSGEFGGLGIEVTMEDGLVKVVSPIDDTPASKAGLMSGDLISKIDGEAVQGMTLEQAVNKMKGPVNTKTKLTIVRKGADAPLEVAITREIIHVRPVRFRVENGDIGYIRITSFNEQTTDGLKKAIASISKQVSPEKLTGYVLDLRNNPGGLLDQAVSVSSAFLQRGEVVSTRGRSPEETQRFTAQGGDLTKGKPIVVLINGGSASASEIVAGALHDHKRATIIGTRSFGKGSVQTIIPLGSGNGALALTTARYYTPSGRSIQAQGIAPDIEILQDVPPELKGRMDTMAEAQMRGHLSAGEGGEQTGSQSYVPPKEEDDKALHAAFDFLHGGTANAIAAKRPAKAAVPN

SEQ ID NO: 14564 - protein, 910 aa, BradyrhizobiumColbertium
MKMKFGSRLFDQIFVRSGPIRWLVAGGTLLIATIAIGSVLMAQNFRERALRNSSRELENTVLLLAHHFDQQLQDFGVIQKAFIDHVRSIGITTGEQYRTRLSGEDVHRMLRSKIEALPYIGGVNVIDAEGNLINSSTAWPAPKVNVADRAYFRTFKYDPFSPDVLIEPLYSRLSGAWTILVARRIVGPGGEFLGVVGRGIEPANFEKFFASVVLGDGATISMLHRDGTLLARYPHSRELMGRNFKTGPFEHQRVFGLDHFAGRFTSPVDGEDRLISSRALPHFPILMMATTTRASALTDWREQIGILTSVAASSALAIAGVLIAVVRKLLEQHRLSRERLTLEKQRLDHAVNNMTQGLLLFDSERRLVVCNQRYIEMYGLSPDIVKPGSSFHDIIAHRKATGSFTGDVDAYVALVLKDIHVRNSMVVDTADGRSIHILNEPLADGGWVATHEDITERRRIEERITHLAHYDSLTDLPNRTMFHEHLRGELAALRDGEQIAVHYIDIDEFKGVNDALGHLVGDELLKSVATNLRRCAGPADFVARLGGDEFAIVQSAVTSSDRVSELVARVFEAIRTPFDCMGHHLTSDASIGIALAPEHGTVLDQILKNADMAMYAAKSAGRRTYRFFEPEMDAKVRERRQLENDLRHALAQGGLEGGLEVYYQPCLGLKDDRITGCEALVRWRHPGRGWVSPAEFIPIAEDTGLINEIGEWVLATACRDAANWPDDIRLAVNVSPVQFKSGTLALKIMAALAASNLPASRLELEITEAVLIRDDDAALAILHQLRAIGVRIALDDFGTGYSSLSYLHRFPFDKIKIDRCFVDDIARPDGSASIVQAVVNLAAARRMTTTAEGVETEEQQRLLRTLGCSEMQGYLFSAARPADKMLELFALHRSRLARREGSESRRREAG

SEQ ID NO: 14565 - protein, 177 aa, BradyrhizobiumColbertium
MARKPANTKPIKRKPAESGAGPALTHIGASGEARMVDVSDKPATARRSVAEGRVVMTKATLDLIVSGNAKKGDVLGTARIAGIMAAKRTSELIPLCHPLALSKVTVEIEPDVKLPGCLVRASVKVTGPTGVEMEALTAVSVACLTIYDMIKAVERGVRIEGIHLVEKLGGKSGHYRA

SEQ ID NO: 14566 - protein, 275 aa, BradyrhizobiumColbertium
MRMSDILTKIETYKRDEIAAAKCAQPLSDLEAKAKAQAAPRGFVRAIKAKHAHGDFALIAEIKKASPSKGLIRADFDPPALARAYEAGGAACLSVLTDTPSFQGHLDFMVAARAATSLPVLRKDFMFDTYQVVEARAHGADCILIIMAALDDAAAKDIEDAAIAYGMDVLIEIHDRAELERALKLRSPMIGVNNRNLRTFETTLATSELLAPLIPQERLMVGESGIFTPEDLTRLERVGMSTFLVGESLMRQADVTAATHALLARKTAAHATGTR

SEQ ID NO: 14567 - protein, 195 aa, BradyrhizobiumColbertium
MKIVRVASSTRVGPTFFMAGWWAGANMKPMPHSRTQRPTCSGFRSILTPSEASTSAAPERDDSARLPCLATGTPAPETMKAAQVETLTEPEPSPPVPTMSTASGGAVTVSILERIAATAPVISSTVSPRTRSAINRPPICEGVASPLIMASKAEAASSRDRLAPVATFPMIDFRSSIACFQLTGSRRSPARRRPD

SEQ ID NO: 14568 - protein, 628 aa, BradyrhizobiumColbertium
MRKASSNWLGKTIMAMVMGVLIISFGIWGIADIFKGFGQSTVAKVGSTEISLNEFRQIYTDRLQQISRQFGRPLTPDQARAFGIDRQVLQQTIAEAALDEEARRLGLGQSDEQIRHVIMNDPNFKGVGGNFDANRFQAVIRNFGYTEQRYVAEQRKVSLRRQITGTIGAGIKPPKTMIDMLTRYQNEQRSIEFVRLDAAQAGTIDPPSPEALAAYFGDHKVQFRAPEYRKIAFVVVSPEDIGKWTEVSDEDAKKVFEQRKDRLGTPEKRQIQQIVFPNVAEAQAARERLVSGTSFEDLGKERGLSASDIDLGLVTKSSLTPAVGDAAFALPVGEISQPIQSGLGVAIVKVDKIEPGKEADYASLAGDIKREIATERARVKVADLRDKMEDERGGGSSVIDAAQKLGLTAATIDAVDRSGRAPDGQPVANIPQGLDVVSQAFNTDVGVDSDAISYKGGYVWYDVLAITPSRDRNLDEVRDQVEARWRQDQIAAKLKTKATEMVQKLEAGGKLADEAAAIGAKVETATGFKRDDSPAGVPGTVVAAAFRTAKDGVGQTAVSGGSEVIVFRVTDIVEPAVDVASDAVKKLKESLDRAQTEEQVASYINKLEADIGTTINQAAFAQVTGANQ

SEQ ID NO: 14569 - protein, 37 aa, BradyrhizobiumColbertium
MQIPQKRVTKLINHHKVAAFPPQPRLGRRFEPAVKSL

SEQ ID NO: 14570 - protein, 251 aa, BradyrhizobiumColbertium
MTDAIRPLIAGNWKMNGLKAQAAEFDAMLSGAADVAGKADLLVCPPATLIATFADKARGKKVAVGAQDCHPKASGAHTGDVAAEMLVDAGANAIIVGHSERRADHGESDALVRQKAEAAWRAGAAAIVCIGETQAQRDAGQTLDILRGQLGGSLPDGSIAANLIVAYEPVWAIGTGLTPTAQDVEQIHGFIRELLTSRFKDEGTKMRILYGGSVKPSNAAELMAVKNVNGALVGGASLKAADFLAIAKGCP

SEQ ID NO: 14571 - protein, 127 aa, BradyrhizobiumColbertium
MQTVVIVIHLMIVAVMIGAVLLQKSEGGGLGMGGGAGFMSSRGTANLLTRTTAILAVGFFITSLFLSWYAGYNRAPSSIIGQPSQTQPAGGSPIAPPTSGGILDSLKKADEQQQNQAPSGPQVPRSQ

SEQ ID NO: 14572 - protein, 543 aa, BradyrhizobiumColbertium
MARYIFITGGVVSSLGKGLASAALGALLQARGYKVRLRKLDPYLNLDPGTMSPYQHGEVFVTDDGAETDLDLGHYERFTGRPATKADNITTGRIYQDIISKERRGDYLGATIQVVPHVTNAIKEFVLEGNDEFDFVLVEIGGTVGDIEGLPFFEAIRQLKNELPRDHAVYIHLTLLPYIPSAGELKTKPTQHSVKELRSIGIQPDILLCRTDREIPKEERRKLGLFCNVRESAVIEARDVDNIYAVPEAYHDAGLDDEVLAAFGIASRIPPELRSWREINERIRNPEGNVTIAIVGKYTGMKDAYKSLIEALSHGGIANKVKVNLDWIESEIFEKEDPAPFLEHVNGILVPGGFGQRGAEGKIKAAQFARERDVPYFGICFGMQMAVIEAARNLVGIEDANSTEFGPTKEPLVGLMTEWLRGNELEKRSQAGDLGGTMRLGAYPAALNRGSRVSQVYGGATEISERHRHRYEVNTAYKDRLEQHGLKFSGLSPDGVLPEIVEYEDHPWFIGVQFHPELKSRPFEPHPLFASFIEAAAKQSRLV

SEQ ID NO: 14573 - protein, 108 aa, BradyrhizobiumColbertium
MIYEMRVYRCVPGRLPALLKRFEAVTLKLWEKHGIKQAGFFTTLIGESNQELTYFLAWDSLAEREKKWGAFMTDPDWLEARAKSEADGQIVGNIVSQILAPTAFSAVR

SEQ ID NO: 14574 - protein, 282 aa, BradyrhizobiumColbertium
MSSSTSAAPVVTIGTVKFGNDLPISIIAGPCQLESREHALEVASALKEIAARLKIGLVYKTSFDKANRTSASAARGLGLAQSLPIFAEIRSSLGLPVLTDVHEAAQCAEVAQAVDILQIPAFLCRQTDLLLAAAATGKVVNVKKGQFLAPWDMANVVGKITGGDNPNVLVTERGVSFGYNTLVSDMRALPILARTTGAPVIFDATHSVQQPGGKGASSGGEREFVPVLARAAVAVGVAGVFIETHPDPDRAPSDGPNMVPLREFEGLIARLMAFDALAKNPR

SEQ ID NO: 14575 - protein, 401 aa, BradyrhizobiumColbertium
MQQGETRSHDQGLPAALYVISGASFAAALSARALDPVLPHVAEDFGVSIATAAGFAAVFAFTFSIIQPIIGAAADLFGKTRLMIGCLALLGLANILGAFSTSFSVLFATRILAGIGSGGVFPVALSLTSDLVGPDKRQVAISRTLAGAMTGNLLGASASGLIGDFLGWRGVLAVLGAIVIVASIAVAAGFHGAKVKHPPKTSLSALRAGYRTIFTNPNAYVCYSAVFIEGCCVLGLFPYIASFLFDLGQTSLSIAGIVIAGFAVGGLFYTLTVSRLLPRLGVKGMMIAGMTLVASQLIAVAFGPRWEVQALNLIVMGWGFYIAHGCLQVFASELSVEARATALSLHSFFFFMGQTVGPLAYGFGLQHAGKMPTLFTSALIMAVLGLFCARLLKQRAPADAR

SEQ ID NO: 14576 - protein, 162 aa, BradyrhizobiumColbertium
MSKKPSKSKTPRLDPAALQLGHAVAWPDAPDKAQLDRVPNPQSGTDYLVRFTVPEFTSLCPVTGQPDFAHLMIDYAPGAWLLESKSLKLYIASFRNHGAFHEDCTVMIGKRIASEIKPKWLRIGGYWYPRGGIPIDVFWQTGRIPKGLWVPEQGVAPYRGRG

SEQ ID NO: 14577 - protein, 427 aa, BradyrhizobiumColbertium
MTAIIDIIGREILDSRGNPTVEVDVALEDGALGRAAVPSGASTGAHEAVELRDGDKARYLGKGVTKAVGAVNGEIFEALSGLDVEQQAQIDQIMIDLDGTPNKSRLGANAILGVSLACAKAAANSLDMPLYRYVGGTSARLLPVPMMNIINGGVHADNPIDFQEFMILPVGASSFAEGLRYGAEVFHTLKSELKKAGHNTNVGDEGGFAPNLPSADAALDFVMNAIGKAGFKAGTDIMLGLDCASTEFFKDGKYVYEGEGKSRSISDQAKYLADLVARYPIVTIEDGMSEDDMEGWKELTDLIGKKCQLVGDDLFVTNVKRLAEGIKAGRANSILIKVNQIGTLTETLAAVEMAHKAGYTSVMSHRSGETEDSTIADLAVATNCGQIKTGSLARSDRTAKYNQLLRIEQQLGKQALYGGKAALKALA

SEQ ID NO: 14578 - protein, 377 aa, BradyrhizobiumColbertium
MSDGTTGLELRSLLKKSGELELFLVNVPTPEPADDEVVVRVEATPINPSDLGLLIGPADMSAAKASGTKEMPVITARMPEGAMRMMAARFDQSLPVGNEGAGTVIRTGSSDAAKALMGKTVSMIGGAMYTQYRVLKVRDVMELPAGTTAADGASWFVNPLTALGMTETMRRENHKALVHTAAASNLGQMLNKICIRDGIGLVNIVRSKEQADILHKIGAKYVVDSSAPSFMDDLTNALVETGATIAFDAIGGGKLAGQILTAMEIAANKTAKEYSRYGSNVYKQVYIYGSLDPRPTELNRSFGLSWGVGGWLLTPFLQKIGPAEIGRLRQRVASELKTTFASHYTKVVSLPEALDLANIAVYAKRATGEKFLINPNK

SEQ ID NO: 14579 - protein, 332 aa, BradyrhizobiumColbertium
MIDLNRRHLLAGAAAMGAAAATGLRPIAANAAAPQVGTQAPGFYRYKVGSFECTSINDGARTFPMPDKFVANISKEEALAAGEAAYMPKGMVTVPFNPQLINTGSKLVLIDTGNGIANFEASKGAVGRTLQNLQAAGVDPKNVDVVLLSHMHGDHINGIRLADGALAFPNAEIMVPGKEWEFWTSEDNAAKAESNPALKNNFANVKKTFAGLESKVTRYDWGKEVAPGITSIATPGHTPGHTSFAVASGDAKVLIQSDVTNIPEFFLRNPDWHVMFDMDAAMAQAMRHKFYDMAAAEKATVIGFHFTFPSIGHVAKDGAKYRLIPSAWNPTI

SEQ ID NO: 14580 - protein, 183 aa, BradyrhizobiumColbertium
MAYNIVTIAGSLRKESFSLKIANALAKLAPGSLRLEVITPAGISFFNQDLEGTPPADWVAFREKLQASNGILFVTPEYNRSIPGVLKNAIDVASRPYGKSSLLGKPVGIISNSPGLLGGVSAAKHLQNVLPGISGPVLQQPEIYLSGVGDAFDADGNLTKDSLKAVLQQYIDAFAAHVAKHQG

SEQ ID NO: 14581 - protein, 105 aa, BradyrhizobiumColbertium
MVSRARLKSILTGLALYAMAAAIVGYFGVNAYTGKYGLNARQELDQEIIALTSELAQLKRERARSEHRVSLLRSEKIDPDMLDERARYQLDYVNPRDLVRIIPAN

SEQ ID NO: 14582 - protein, 320 aa, BradyrhizobiumColbertium
MNGSTPRHHAARIEAAIASGQAARSALVASWRRSSRLHRLDPGGRTAPMRLTEAELREARERIAPLLAAAQGAMDRLYQAVGAAGCCVLLADREGVPVDRRGMVADDATFQSWGLWTGALWSEEHEGTNGIGTCLVEQRPLTIDRDQHFFARNTLLSCTAVPIYDHDAALAGVLDVSSCRADRTDAFAGLIALATGEAAKRIEADLFRKAFAHARIVLTQAADGSCSGLIAVDADDLVIGATRSARVALGLALGRALQPVPAADLLGDDSASDHLAGGQRAVLQRALLRAGGNVSAAAKALGISRATLHRKLKRFGLNAH

SEQ ID NO: 14583 - protein, 74 aa, BradyrhizobiumColbertium
MLFAQFVALARLARTMSREVFPVSPWESDGAADLSQFCDSRGRGSAGLRARSFHTVVVASAQIARLNARSTRTA

SEQ ID NO: 14584 - protein, 505 aa, BradyrhizobiumColbertium
MNKVEFLSVTKVPFAERYDNFIGGKFVAPTSGKYFDNASPVTGQIVCKIARSDAQDVEAALDAAHAAKVGWGRTSVAERAAILNRIADRMEDNLERLAIAETWDNGKPIRETRAADLPLAIDHFRYFAGVVRAQEGSISEIDHDTIAYHFHEPLGVVGQIIPWNFPLLMACWKLAPALAAGNCVVLKPAEQTPASIMVWAEIIADILPPGVLNIVNGFGLEAGKPLASSPRIAKIAFTGETTTGRLIMQYASQNLIPVTLELGGKSPNIFFKDVIAEDDDFFDKAIEGFVMFALNQGEVCTCPSRALVHADIYDRFMERALKRVAAIKQGDPRDPTTMIGAQASGEQLSKILSYIDIGRQEGAKVLAGGQRAELTGDLAGGFYIQPTVFEGHNKMRIFQEEIFGPVVSVTTFKSDEEALAIANDTLYGLGAGVWSRDANRCYRFGREIQAGRVWTNCYHAYPAHAAFGGYKQSGVGRETHKMMLDHYQQTKNLLVSYSPKKLGFF

SEQ ID NO: 14585 - protein, 340 aa, BradyrhizobiumColbertium
MAAPKKAAASTPQDKTDGGSPPEFTREQELKAFRDMLLIRRFEEKAGQLYGMGAIGGFCHLYIGQEAVVVGMQMALKQGDQVITGYRDHGHMLATGMDANGVMAELTGRRGGYSKGKGGSMHMFSKEKHFYGGHGIVGAQVSLGTGLAFANHYRGNDNISVTYFGDGAANQGQVYESFNMAELWKLPVIYVIENNRYAMGTSVSRASAQQDFSKRGVSFNIPGKQIDGMDVRAVKAAGEEAAAWCRAGKGPFILEMQTYRYRGHSMSDPAKYRTREEVEKVRHDQDPIEQVRNRLLAAKVSEQDLKAIDAEVRDVVNAAADFAQHDPEPDAAELWTDVYR

SEQ ID NO: 14586 - protein, 464 aa, BradyrhizobiumColbertium
MPIQVLMPALSPTMEKGNLAKWLKKEGETIKSGDVIAEIETDKATMEVEATDEGTLGKILIPEGTADVAVNTPIATILADGESAADLAKAPAPAKQEKAAESAPPAAAKPEMPQSKAPTGVPQQAVAEPDPEVPAGTEMVTQTIREALRDAMAEEMRRDADVFVMGEEVAEYQGAYKVTQGLLQEFGAKRVIDTPITEHGFAGVGVGAAMAGLKPIVEFMTFNFAMQAIDQIINSAAKTLYMSGGQMGCSIVFRGPNGAAARVAAQHSQDYSAWYSHVPGLKVVAPYSAADAKGLLKAAIRDPNPVIFLENEVLYGHTGEVPKLDDFIIPIGKARIVRSGSHVTIISWSNGMTYALKAADELAKDGIEAEVIDLRTLRPMDTETIINSVKKTGRAVTVEEGWAQSGVGAEIAARIMENAFDYLDAPVTRVSGKDVPMPYAANLEKLALPSAAEVVEAAKAVCYR

SEQ ID NO: 14587 - protein, 100 aa, BradyrhizobiumColbertium
MAGPKEQPLPPDVMTRDDAVEILRVFVLDGGLSMAFQRAFEEPDMWGLLLVDLARHAARAYARESEYTEEDALNRILEMFQAEIERPTDTGTTTPRGKGH

SEQ ID NO: 14588 - protein, 150 aa, BradyrhizobiumColbertium
MAIESYHYDFMLEAIREAEASIAQGGLPIGAVLTRDNKIIARGHNNRVQENNPILHGEMSCLREAGAISFHDTVMYTTLSPCSMCAGALALFKVRLVVIGESVTFEGSKDILDKFGIPWIDLADDRSITMMKNWRSIAANERLWQGDIGN

SEQ ID NO: 14589 - protein, 456 aa, BradyrhizobiumColbertium
MPINILMPALSPTMEKGNLAKWLKKEGDKVKSGDVIAEIETDKATMEVEAIDEGTIAKILVPEGTQDVPVNDVIAVLAGEGEDVKAAGSAKPSASAAPPKAAEKTADKPAVPPAAAPAPAPAAPRAAPSAATAAPQAAAPAAQANGHGGRVFSSPLARRLAKEAGIDVAMIAGSGPHGRVVARDVEQAKSGKGLKAPAAAPSGAPSIAPTMSDKQILSLFEPGSYDIIPHDGMRRTIAQRLTASIQNVPHFYLTIDCDIGKLLAAREEINAAAPKDKEKKPLYKISVNDFVIKAMAVALQKIPNCNVSWTESGMVKHHHSDVGVAVAMPGGLITPIIRKAETKTLSTISNEMKDFAARARSRKLKPEEYQGGTTAVSNLGMYGINHFTAVINPPHATILAVGTSEERPVVRGGKIEIAHMMSVTLSCDHRAIDGALGAELIGAFKQLIENPVMMMV

SEQ ID NO: 14590 - protein, 79 aa, BradyrhizobiumColbertium
MILHARTRWPWISLLLGAGVALNPVGLDFLQSAFLSGEQLSRNIAQPIVLSALAILVLIGTIEWLVRFVVVKRRARGAS

SEQ ID NO: 14591 - protein, 473 aa, BradyrhizobiumColbertium
MADTSFDVIIIGSGPGGYVAAIRAAQLGLKTAIVEKSYLGGICLNWGCIPTKALLRSAEIYHYMQHAGDYGLSAEKVSFDPKAVVQRSRGVSKRLNEGVGFLMKKNKVSVIWGAAMIDAPGKITVKKSDVEGPKGALGEGAYQAKHIIVATGARPRVLPGLEPDKKLIWTYFEAMVPERMPKSLLVVGSGAIGIEFASFFHTMGSDVTVVEVLPQILPVEDAEIAGLARKRLEKQGIKIMTSTKVTKLEKKADSVVATIDDGKGKPVTSEFERVISAVGVAGNIENLGLEKLGVKTDRGIIVIDGHGRTNVPGIYAIGDVAGPPMLAHKAEHEGVICVEAIKGLNPHPMDKNMIPGCTYCHPQVASVGLTEAKAKESGRETRVGRFPFVGNGKAIALGEDQGLVKVIFDKKTGQLLGAHMVGAEVTELIQGYVVAMNLETTEEELMHTVFPHPTLSEMMKEAVLDAYGRVLNV

SEQ ID NO: 14592 - protein, 413 aa, BradyrhizobiumColbertium
MKDNDNLTIERPTFVTHLECAMEGDHYAADQVHNLSKAGKPLLVRYDLAGVKQALTKDALSQRPGDMWRYRELLPVRKCRDIVSLGEVTTPLIRLPKLGAKLGGGEIIVKDEGRLPTGSFKARGLVMAVSMGKALGIKHMAMPTNGNAGAALAAYATNCGIKTTIFCPADTPEVNVSEIELQGATVYRVNGYIDDCGKIVGEGKAKVGWFDTSTLKEPYRIEGKKTMGLELAEQLGWDVPDVIFYPTGGGTGLIGMWKAFDELEKIGFIGSKRPRMVAVQASGCAPMVRAYEAGTEHATRWEDAQTIASGIRVPQAIGDFLILRAVRESKGFAIAVDDDKISSALNEVAREEGLLLCPEGAATYAAYKQSLADGRVSKGDRVMLFNCATGLKYPLPPVTRALDRHKPIDYAQF

SEQ ID NO: 14593 - protein, 323 aa, BradyrhizobiumColbertium
MTKAVWAALIAILVVTGAARADDYPTRPITIIVPFAAGGPSDAMARVLAERMRVPLGQPVVIENVTGAGGSIGVGRAVQSPPDGYTISFGHLGTHVANGAVYKLKFDLVADLEPVVLLPSNPMILVTKNSVPATSLKELLAWLKSRPSPPTAGTAGAGSGSHIAGVYLENVSGIKLQYVPYRGTAPALNDLIAGQIDLMVDQTSNSIGQVRAGTIRAYAITDDKRLASAPEIPTADEAGLKGFNMTLWSGMWVPKGTPKEIVAKLNAAAVEALNDPAVRKQLESQGLEMTPKDQLTPEALGMRQKAEIAKWWPMIKAANIKVD

SEQ ID NO: 14594 - protein, 272 aa, BradyrhizobiumColbertium
MRPPAPLLAAADTHVADERVRAADMLYALGERDMVFYYARDFAKESTDVAALEALGELAGRHNHARVMLEVGKTALARGLALDHYAFPTIGIPEHKQVAPAIETSVIYSVARTESSFEQRDKSHANAVGLMQVTPEAARDTAKRFGLKYDWDKMVSDPVYNTQMGAAELSALLSEYRGNQIMTFAGYNAGRGRVREWVQKRGDPRDPNVDPVDWVERIPLSETRNYVQRVIENVLVYRARFEGSSMVAGKSDQRVVTKDAAAATPVASTDAD

SEQ ID NO: 14595 - protein, 43 aa, BradyrhizobiumColbertium
MRLENQSTGRRDIIVSHSSRCRNNAAKCGCDKRNLRKGEKVAL

SEQ ID NO: 14596 - protein, 578 aa, BradyrhizobiumColbertium
MPIFNQSIRRKIVGIALGLIVLMLFTSILSMAMSSQVGVLLDELTNRYIPAYSHLARANSRSLERGLALRRMVMTRMEAPSDEEAYAARLRDFEASDRKIEEEAEAARKLINAIIDDPRTYSDNAALGRIDSRIETAVSELRRDLSEDHTKLIKQVEAKQMSEARGTLEHIDVLRDQFNRKIDTIRADMLTQVFFSTSQVIGRQHQAIIVSGVVTLLAAIVGFAFALLVSSGITRPVRLLLAGTREVEAGRFDKPITVSTQDEIGELAAAFNRMIEQLRHNERIRETFGRYIDPKVVQGLIDRPEVAIDGERRVMTIMFCDMSGFTSMSEGMTPRGLVKVMNHYFTVMSGPIRSNRGVIDKYIGDAIMAYWGPPFIEEDEAALLAALAAIEMADQVPALQKQLPDLLGIRAMPALCDLRIGIATGEVLTGSIGSELMMSFTVMGDAVNLASRLEVVNKVYGTRILIAQGTADAIGARLELREIDRLAVAGQSAPQAIFEVMGRAGALTDAQAGLRTHYAEGLAAYRARRFDDARAAFNAALEAIPGDGPSRTMLGRIAQFAANPPDAGWDGAWRLDQK

SEQ ID NO: 14597 - protein, 58 aa, BradyrhizobiumColbertium
MTHLTDRLERFETLTAECELIAKLATDSSKREFYLKLGEQYRQLALDIRRAIATTAAA

SEQ ID NO: 14598 - protein, 70 aa, BradyrhizobiumColbertium
MRLVAVIIIALMTVACDQEQDITGSTTPACPMRNYSYNPRDLSQCVNACRACDRGTTVTCTTSCTLKGAR

SEQ ID NO: 14599 - protein, 85 aa, BradyrhizobiumColbertium
MGMLDPGRFLVSCSHCDAWPMAANVKRSSWSASPNEVRFVCTRCRREETAIVSASGELMPIKRVDDPPRDVAVAWARAQRLRGRT

SEQ ID NO: 14600 - protein, 741 aa, BradyrhizobiumColbertium
MSCFVTAARRCCAGIVAAFSFHSLNLSIANAEQLAAEQLPPVEVTNSDDQNRTRARVTGEGDRGRRRATPTGAPAGTNSAGPGSEADNDGGIVGAATTVVTAADVAHAPTQNLAEIIAAQVPGAQITTFYGGPIGAKTSVDLRGFGSFATANTLVLVNGRRLNDIDMAQVDLATIPLNAIERIEITRGNSGAVLYGDNAVGGVINIVTKNGVGGPPATARIEAGFGSFNTRLGNVSTALTSGPWSTSFYGNAARSDGYRDNNRYVQENGVGNLNYTTPGLTAFLTVTGDNQALRLPGGRLVDPSIGLDELATNRRGTSTPFNYANQQGFGATAGFTKTLVNGVDLIVDGGMRDKKQQSAFFSSPTPVPALFTSTYVDAELATWSITPRLSVKSLLGGMPSQLLTGVDYYDASFRQNRGAGQGLAAWHNYDLRQRTVAGYVQHTLGVTPTTDVSYGARVQSIHLTARDNFDPAAPFNADIGALPLRSDETQYALHLGAEHRVSDTVALFGRAARAFRTPDVDERVSSGPSFDPFFNPLPQTFQLKTQTSQDIEGGLRIRGGGLQMQSSLYLMDLTNEIHFNPVLFYNTNLDPTRRYGSETSISYRISDALLLRSGMAYTRAVFREGIWAGNDVPLVSRYTASAGVTWNIWQNYLVLDATARFWSERRMDNDQAGTQKPIPANGTIDLKVSGQYERYFWSFSVNNVLNALYYDYAIASTFTDGRFNAYPLPGRSYLLKAGATF

SEQ ID NO: 14601 - protein, 193 aa, BradyrhizobiumColbertium
MVFSIFSSDTDRFRLHPVAPRLAPMFGFALLTVSCALASLAFACATPFAAFAVLAAAMLPLRPALLVVTGAWLVNQTIGFGVLHYPVDGNGIAWGFVIGAAALLSTAAASAVLRTLPQGRAALMLAIALFAAYATYELALFAATPFLGGEAAFTADIVARLGLTSAVWLAGLVAVCEVVRLVDPFSRKSAMSA

SEQ ID NO: 14602 - protein, 185 aa, BradyrhizobiumColbertium
METFVGTDYDKLFFKSEGLYDGKTRTTEEGQLQVLYSRLISYYFDAQFGVRQDFSKKSHRTYAVIGIEGLAPGFIEIDAAAYVSQKGEVSAQVTAFHDLLITNRLILQPRIDVKFQMQSVPDLELGAGLTDFELGARLRYEFTRNFAPYVGVNWDRKVGQTATIAKNNRESVSAVSFVAGARLFW

SEQ ID NO: 14603 - protein, 393 aa, BradyrhizobiumColbertium
MTTISQSVVSENIEAAPSIARNAAVDRARTFLMLVVLLHHAIIPYTYFGHTDPEGWIGFDMMVLANDSFFMAMFFFLSGLFVWPSLAHKKPGVFLCDRLLRLGLPFAIATLTIIPLAYYAIELRQSPNTNLAVFWWKMVTVGPWPSGPVWFVWVLLALDLTAFLFYRFTPLLLDPINRISLSSHSRPAIFFLFLLLATALLYVPARVYFGAGRWFEFGPFSLQASRVLLYPTYFFVGAGVGMANFDRGLLGTDGHLAKSRWHWVVVALLSYCLLWMLIYVKREMLGNPVWLPNWYEASYGLFFVAFSAATMLAILGYFLRFNRSGFTLLDTIRTDGYGMFLVHYPIALWIQYWLYDFDAPAFTKALITFVLTVLFSWGAAAALRAIPGAARVL

SEQ ID NO: 14604 - protein, 153 aa, BradyrhizobiumColbertium
MADSNKSKYPTGGGYGRFFLGAVAVFAAAALFWMTFSSGPAPRSLSAEVAEPELSSLAATGKVLYEANCAICHGIRASGTDTGPPLVHDIYNPGHHADHAFFAAAKFGVRQHHWRYGNMPPQPQAREDQVAAIVRYVRELQIANGIRYKPRRM

SEQ ID NO: 14605 - protein, 577 aa, BradyrhizobiumColbertium
MAELGRRCVLALGFGSNVEAAATLALSSLMQPFDRLLDGQLSDWARWHRCCDERCDCVLAVPADLRNQLAVSKAVLRSHLDKTYPGAMVASLSVPWGDCGEERGGYFLVWPRDLVQCATALLAIGGEAEARDTLRYLIATQNADGHWNQNQWLDGRSFWRGVQLDEAALPVLLAAALAERNALAGTEVADMVGRALAFVARQGPATDQDRWEENAGINPFTLAVCIAALVSGSAFLNMKAADWALELADFWNENVERWTSARATEIGRRAGAASHYIRTAPPSVLRSGQAAMDQPVAIRNRADGLQLAAREQVSTDFLQLVRFGLRRPRDPLIQSTIAVIDRLLKVETPAGAVWRRYNEDGYGEHENGGPYDGTGCGRPWPLLTGERGHIELTAGRDALPFLRTMASCASPGGMIPEQVWDAAPIPQRRLAPGRPTGSAMPLAWAHAEFVKLLMSRALGQPFDRPHLVWNRYQGIRPLARSAFWWPHAQIGSIREGAELVVASRDEAAIRVGIDGWRLVDEVPAKDTGLGFFAARLDTAGLKAGQQLEFTIRWNTGEWIGRNFSVAIEPPAPREPVS

SEQ ID NO: 14606 - protein, 237 aa, BradyrhizobiumColbertium
MKLMTRFAQTEALFAADRQEDQSNMSELNDAPGVPGIAPTWTSSAKDAVGCSLGPARLWFTIGYGILNEVYWPRVDLPQIRDLGFVVSDGKGFWSEVKRCGKYSLRSLASGTPAYEIVHPHDRYRLTLRISPDPRRDVLACRGRAGEQRAGNAGICPTCPAPRGERKQQPSRHREAQRTNRALGRSGAVFPRTRRRRSGPKGCGAARERRLRWLQRRLAGFCAQRRNDVVISVGRTW

SEQ ID NO: 14607 - protein, 101 aa, BradyrhizobiumColbertium
MMKSAVKSALFAIALAVAPSVAFAQGNLAAGEVKKVDESAGKITLKHGPIKNLNMDEEEMTMVFRVSDPSMLKQVKVGDKVQFEAERQTGGITITKIQKSR

SEQ ID NO: 14608 - protein, 176 aa, BradyrhizobiumColbertium
MIVRLQSRKGRYEMNYTSALAAAAMAWSLSTVTWADPGHHQGGHHNKDETYSAGEPGDPKKPARVVQVTMNETDGKMVFVPEKVDVKKGEQVKFVLRNNGELDHEFILATTAENLKHAEAMKKNPDMEHDDPNGKRLAPKKTGEILWKFDTAGEFEYACLIPGHREGGMVGKVVVK

SEQ ID NO: 14609 - protein, 462 aa, BradyrhizobiumColbertium
MEMLSRRSFLGTATALASASLVSGRVQAAGIPEAPTMDKVATQPPLHPSSGPEYRPVVTLNGWSLPWRMNGDWKEFHLVAEPVVREFAEGMKAHLWGYNGQTPGPTIEAVEGDKVRIFVTNKLPEYTTVHWHGMILPSGMDGVGGLTQPHINPGKTFVYEFQVKHSGTFMYHPHADEMVQMAMGMMGMFVVHPKDPGFRPVDRDFVFVMSSYDMDPGTYLPKVTEMTNFNMWSWNARVFPGIDPLPVRLGDRVRVRIGNLTMTNHPIHLHGHSFSVSGTDGGWVPESAQWPETTIDVPVGAIRAFDVLADNPGDWAFHCHKSHHTMNAMGHDLRTLIGVSKKDIAKAVKRLAPDSMAMGSTGMAMGEMEMPLPDNTLPMMTGSGQFGPIEMGGMFTVMKIREGLGRDDYSDPGPYRFPKGTVAYEIETPAAEPPRQDTQPNAGERKGAKGTKGMKGMKMKGA

SEQ ID NO: 14610 - protein, 428 aa, BradyrhizobiumColbertium
MIAIRSADDDDLANTLIAQLLRRTLTVDTAVQIALLNNRGLQAAYSELALAEADAIEQSLPPNPTFSISRISGNGGYELERQVVGDILALATLPFRSDIARRRFREAQLRAALETLRLAADVRRAYYQAVGANELVVLLTETKTTAETIAQLAEKLGHSGSMNKLDQAREQVFYAEITADLASVRQQATSLRERLARLLGVWDGRLDFKLPKALPSLPRAPKSLPNIEVEAVSHRIDLQIARIELEVLAKALNLTEATRFVTLLDLAGIYRKTKDPESPPFRERGFDLQFQVPIFDGGEVRVRQATESYNIAFNRLTEKAVNVRSEARDAYRVYRSSYDIAGHYQREVVPLRNIISDEAQLRYGSMQIDVFALLAEAKLRIAAQRASIDARRDFWLAQSELQTAVNGGGRADSQQESRSPTNSLASGG

SEQ ID NO: 14611 - protein, 98 aa, BradyrhizobiumColbertium
MLAQMAANDAAAFNAFTRTGSRRAVIRRTILIVLVGPFLAGCSTTVPLVGADPADPGVKVRRVGYRPTVAPYVSLRPISPAGWREQNQRVAPTPKNER

SEQ ID NO: 14612 - protein, 79 aa, BradyrhizobiumColbertium
MPVMAMLVVVAVLMLLGVLMSRQGFVGALSHYFGEAGRKRRGDGRRQRPEQIRDGDEPPPPSARRLSEANHPIYRHSED

SEQ ID NO: 14613 - protein, 158 aa, BradyrhizobiumColbertium
MGSKNPGCPSRRNRANEPAYVLLASTFAREFYAVVPTYNPIPNLLLSPGWRFVRILKGRNARQPCLRGKSAMTAFARDGYYLFTNRQFAPKLPKPASGSPENPGASSSAAGHMLDRSELSAASPDEGALRGSVISGDDNRPDAGGTCGPRHTFDLDQQ

SEQ ID NO: 14614 - protein, 59 aa, BradyrhizobiumColbertium
MAAINRLLAERPEAAGIAVPGMPQGSPGMSGKPQKYSVVLFGPHGRRTYMEFIGSDEVG

SEQ ID NO: 14615 - protein, 227 aa, BradyrhizobiumColbertium
MAVSGWTDAVLPGPLSEKHAFLSNKCESCHTPTKGVEAAACVACHTTAAADLGKQATAFHATSKECRGCHLEHAGGVRPTRMDHAALLRIGAFPHEANTSARAITGQMVADLKKFLRVPNSDEAEKASLDCVSCHSNREPHRGLFGRECASCHAIDTWRIAKFLHPSPTSKECAQCHQAPPSHYMHHFVMMDQMITGQHHARVNQCFLCHRTDSFNDIKDIGWFKHH

SEQ ID NO: 14616 - protein, 234 aa, BradyrhizobiumColbertium
MGDRERLIVDVVLASLLLLIPAFLLHSDERFAGSLAGFALGASAAGLMLLLLVYPLAKYGRNFKTIVTSVVSMRALLGFHVYAGIAASFLALLHTGHKYQSPLGIALVASLLVVVVTGFVGRYYLPQTAAEIRERQSRLATLRSTYDRTALILSAREASADDDPPTSASALQEVPILQLVEGISDLEYAIGSQEAVKKVFTQWIGFHVLAAIAMYALLALHIAGEVYYGLRWLT

SEQ ID NO: 14617 - protein, 687 aa, BradyrhizobiumColbertium
MSIFELVFRNRGGLWVAGLCTLFLAGASIAATAQLSAEQLRDRDSPKRLDAEFGWPADLRLAQAEDNHSAHHPGAPGSGGASAPQSNSPAAPSGGSPAPSSSGSNPGMMGETGIMGEMMGRPRKEFYPSLMEMPALSAERRRDLESEARARINSGIDGLSAAEADLRHAMAGGDIAAADQASGRIRGSLDQVQSGVTVLRSLSEGKSPQQIAQNWFKAQMNLLPPPATFTAEGVLGISWFHVVTMGLLAAFSSGMLAVYVARMRRANALVDRLTKAPALAPTPPVASPAFQRQGGSSDGPAVKPSFTRSDSPEGTATVSTMRATGGSTTPGQLWKGKLKVCAIFKETPSVKTFRLRDPEGGSIPFTFLPGQFLTYSAQIDGKTVRRSYTIASSAAQTAYVETTIKREDGGVFSDYMHDKIKEGDLLDVMAPSGAFTFSGKEADSVVLIGGGVGITPLMAAIRYLFDIAWPGQVHLVYGAQTTEQFIFRDDLEYLQRRMNNLHVAATMARAAGTSWMGSEGQITADFLTRAVPDLARRRVHLCGPPGMMQAIKKTLGELGVPSEQIKTEAFGPALGAVPPPGRTVTESTKSENGGAAAIGPATASVRFARSGKVAQLPPDKSVLEVAESVGVPIDYSCRAGICGICKTHLLEGSVTMEVQDALTEEDRAKGMILACQAKSIGNLVVEA

SEQ ID NO: 14618 - protein, 240 aa, BradyrhizobiumColbertium
MDNIKRFVAITAVAVLGLAAGSPAGKLVAAERAQLAMMDEMKKKPDSSSGTANNMGNMGQPGSQSQSTGGGRMDDKMKMPMPGQMQDCQGAGCQPRDSNMMPMMQMMERMHGRMNQQMNGMGSGAGASASGPADVTERLEGRIAFLKTELQITDKQTADWNVLADALRSSRQHLLEARKLLVMDDKAAGPERLDRYEHHLGERLEAIKSARSAFARLYGTLSDGQKQTADAILLPLIATF

SEQ ID NO: 14619 - protein, 584 aa, BradyrhizobiumColbertium
MQASTCTQCVPQETNRDGRADGGFEEARDRLLNPATDQGALWAYSRDFWERSILFWDTLRQRADDLIEHERRGLPPLLDFRFETILDARQFERPVNYVLLRILPEHESASGPGSEKKPPILILDPRAGHGPGIGGFKQDSEVGIALANGNPVYFVSFFPQPCHGQTLADVLHALRRFVEAVAHRHPDRPPILYGNCQAGWAVTLLSADCSGLVGPAVLNGSPLSYWSGEAGINPMRLAAGFNGGAWLVHLVSDLSDGRFDGAWLAQNFENLKPEAQWEKYADLFTHIDRERERFLDFERWWGSFFFLSREEILAIVENLFIGNQLEGGRFRICEHCFADLRRISNPLVIFASYGDNITPPHQALGWIPVVYKTTEQLIQAGQRIVYLTNPHVGHLGIFVSAKIAQREHRAILASLSEIEGLAPGLYEMKIEEADSSGASNLPFAVRFESRRVEELKFLPPDPAFERIRDFSEAAEAIYRTLFSPFVQATSNPLTAEAAKWFHPMRMSRYLLSSSFSPWLRGLPELASSIRDTHVPLAGDNPYLGAERTFIGLTASLIEATRINRDAALERMFEFLYGRTSSRGV

SEQ ID NO: 14620 - protein, 137 aa, BradyrhizobiumColbertium
MITSERIFNEQTQGAILHGLHWTASAIELLGVVVIVCGVVAATVWSLRELRHGGFADAFRSYRANLGRGILLGLEFLIAADIIGMVAIVPSFDRLGILALIIVIRTFLSFSLQIEIEGRLPWQRRTSLADEADRAEL

SEQ ID NO: 14621 - protein, 386 aa, BradyrhizobiumColbertium
MLPKSQRDLRLDLFRGLANWLIFLGHIPDSALAWFTTRNYGFSDGADLFVLISGYTATLVFGKIMMDRGFVVGATRLLRRVWQLYAAHLLLFLFYLTSVHYLSHRFDDPHLMDQFNVAHLMNFPVETLSQGLALKFKPLNLDVLPLYIVLMAAFPIVLWFMLRWRNAVVVGSIGLYLAARHYGWNFQSYPAGVWYFNPYAWQLLFVLGAWLALGGAEASRRLLRFRILYALSAGVLLFALVITLAERIPELRQLIPDSIDEMFIPNDKTNLAPYRVIHLASLVFIVVALIPIDWPGLQWPIFKPLIRCGQQSLPVFCVGLFLSFVVHFVLEFGSKGILVQLLVGAAGLCILTIIAYYRTWSKQLDKSLSSGGNRSTPAGAGGEPQI

SEQ ID NO: 14622 - protein, 217 aa, BradyrhizobiumColbertium
MIGHATTHKFFEIVLGQAERSSFPPLVGAIAFLSTLTMSVPVEWLVVVASLACRRRWTMIALMAAVGSATASLGLYLTFHHFGWSILLARYPELADSQAWSQATDWLSKYGILAIFAMMALPLPVPKVPMLAVAGIYRLQTADVFVAILAGKIIKYLAYAYLAVRFPEALRFLTQRGSRAHRVPYRVRSLMVARMTTSRKIRTFVTPAGGAETHHQE

SEQ ID NO: 14623 - protein, 64 aa, BradyrhizobiumColbertium
MSRYLMEENSLSLMVFDPAVRRFVRLDDLRLLDRMKRHRWVGYNVFARSGRFWKERLLSACSHQ

SEQ ID NO: 14624 - protein, 72 aa, BradyrhizobiumColbertium
MPFCDAYWSRLLNRSYDYEEEINALPHCGRDERYEFVDCCANFGYWSVLASSKPFGAQHALAIEVGGLNVNV

SEQ ID NO: 14625 - protein, 83 aa, BradyrhizobiumColbertium
MNARKLFLAATIASFVTLPAIAQTAPSPSDGGHHYSGGPRAEPHHMGKKESTAPKKKSSGGSHHYGGGPKSDLPHHIGPKKDQ

SEQ ID NO: 14626 - protein, 85 aa, BradyrhizobiumColbertium
MISGARTIRIHGEDVPVAAEVRNIDALSAHADADETIEWLKSAGAAPRRTFVTHGEPRAARALQTRIAKERDGPASCLNELRRLG

SEQ ID NO: 14627 - protein, 323 aa, BradyrhizobiumColbertium
MNWERFPVQPAGISAVVLTHAHLDHSGGLPLLVKQGFAGAIICSEATAALCEVLLRDSGHLQEQDARFANKRGFSKHKPALPLYTVKDAEAALRLLKPTSFHDDHSLPGGANLVLRRAGHILGASWIEIGWERTSIAFSGDLGRHDDPIMLQPEPLAKTDYLVVESTYGDRSHPKIDPQRTIEEIVGTTAKRGGTVVIPAFAVGRVQALLYYFARIKLAGGLRNVPIFLDSPMAVDASEIFCKFRSDQKLSHEECKRTCAVATYIRSVEDSKRLSDSPVPKVIISASGMATGGRVLHHLKRFASDQKSTVLQAIRPRGREGRR

SEQ ID NO: 14628 - protein, 278 aa, BradyrhizobiumColbertium
MDDTPQTSKETFRPSNIEQLDSPAYTLAALDQGFLLGDSMRGVRFLLEYAKAEECLRSWGVRSTIVVFGSARVREDGPESHSRWYREARAFARLASERGGALTSNGGLRDNVIATGGGPGIMEAANRGAGDAGAPSIGFNITLPEEQQPNPYSTPALTFQFHYFAMRKMHLAMRANALVAFPGGFGTFDELFEILTLRQTKKAPAIPIVLFDEQYWRSAVNFEALIDSGTIDRSDCDLFRFAETSEDIWSELLSCGLGAPGLSCPASQFSRTTSSNAS

SEQ ID NO: 14629 - protein, 53 aa, BradyrhizobiumColbertium
MAAVNFMIHSDFKWVLLGIALVWGVSIVMFVREAVVSPKAAEPAGSKHQRRAR

SEQ ID NO: 14630 - protein, 108 aa, BradyrhizobiumColbertium
MRDASYRWRLSSMLLAASGILLIGVGVYFLLLRPPLLPDDIRYMSLTSIELQLIGPRLTSWPTHVFRVMGGYVTATGMLALTLALTSFRDHRAVAAVGAGVAGGLRSG

SEQ ID NO: 14631 - protein, 225 aa, BradyrhizobiumColbertium
MHDSTPAYGLWSLVIVNSAVFILFAYSFFKPQTSRDWRSFGAFSAFLVALFVEMYGFPLTIYFLSGWLQSRFPDVDWFSHDAGHLLEMVFGWKANPHAGPFHILSFIFIAAGFILISAAWKVLYDAQQTRSLATAGPYSYVRHPQYVGFILVMFGFLLQWPTILTLAMFPVLTIMYVKLARNEELDAESEFGEAYTKYAAEVPGFIPRLSRILGQGSTGRTYRHG

SEQ ID NO: 14632 - protein, 84 aa, BradyrhizobiumColbertium
MSVQDRSGHQGHAPEGLSLKSRAGLVLIGFLIIAGALLFTEHRAHVLGLLVWLPILACPLMHLFMHHGHRHHHADNQQNDPRSV

SEQ ID NO: 14633 - protein, 39 aa, BradyrhizobiumColbertium
MNSCYPIVSKQLAETFFLIEIKQIGPETPANKALAATAA

SEQ ID NO: 14634 - protein, 213 aa, BradyrhizobiumColbertium
MKTDDLIAALSAHVEPVDRRSVGRTVGLALAAATVLTLGGILVGLGTRSDLTTGHAVVSVLLKIVFAVGIVVLASAYLMRLARPGGERRSSSGWAVLPFAGILLLAAISLGLAPSTHWAKMVMGDEWLECIISIPIIAIVPFTVVIAAVRTAAPTNLVRTGAFAGLVSGGISAMGYALHCTDDSLPFVAIWYGGTIVLCTLAGAMLGPRLLRW

SEQ ID NO: 14635 - protein, 125 aa, BradyrhizobiumColbertium
MAIHIKRHTYDATDLLTPWVHAIARHKLIDFLRRTRASLADVPLDEADEAMASDEHVGAESSYDVGRLLRRLPPNVKCSMEAVKLDGLSIAEAAQRCGLSESGIKVNIHRGLKTLAALIAREARS

SEQ ID NO: 14636 - protein, 432 aa, BradyrhizobiumColbertium
MEAIVKAYQSNPQLSAARARQRATDENVPQALSGYRPQIVASLSAGLQQVRNLLPDNVVQTVTLKPWTVGLTVTQTLFNGFKTANNVRVAEAQVRSGREALRNVGQGTLLNAVTVYMNVLANGALVDAQRANIAFLRQTLSNTRSRLNAGDVTPTDAAQAEARLNCGLADLNAAEVALAVSKATYTQVVGGPPAQLVAATPADRFSPPTLADATNVARQENPAVLAAQFDVDVAQSSIAVAESGLLPTVSVQASVSRAVQNDPTLATSRMDQTSVLGQVGVPLYDAGMAAAQTRQAKEVTSQSRLVLEQVRNQTRTAATGAWVANEGAKVAVTAAESEVRAANVALLGVQREAQAGQRTTVDVLNALQDLTNARARLILAQRDRVIASYTLLGAVGRLDVKTLGLNTPDYLPEVHYYQVRDAWHGLRTPAGQ

SEQ ID NO: 14637 - protein, 660 aa, BradyrhizobiumColbertium
MIENAHKHLERAKPGQSRVQILIEAASEVGPALFFSLLIITVSFMPIFTLESQEGRLFSPLAYTKTFAMAAAALLSVTLVPALMVVFVRGKIVPEHKNFINRFLIWVYRPVIKGVLRAKTLVILASVTVLAVTIWPARQLGTEFMPTLNEGTLLYMPTTLPGISVTKAAELMQMQDRIIKSFPEVASVYGKAGRAATATDPAPTEMFETVVNLKPKAQWRPGMTIDTLIAEMDKALQFPGVSNAWTMPIKARIDMLSTGIRTPIGIKVMGTDLVEIDRLAKQIERVIKTVPGTSSAYAERGIGGYYLEIAPDREALARYGVLIQDVQDTIAAALGGQTVTTTVEGRQRFTVNMRYPRDLRDNPKAITSDILVPMPAGGAVPLGEVAKVEPARGPTSIRTENGQLATYIYVDIRDRDIGSYVADAQRAVSESIQFPAGYYVVWSGQYEYLQRAAARLKIVVPVTLTIIFLLLYLNFRSITETLIVMLSLPFALVGGLWMMWWLGFNMSVAVAVGFIALAGVAAETGVVMLIYLDHALAETSERIKAEGRALTRSDLYDAIMQGAVERVRPKMMTVVAIMAGLLPIMWSSGTGSEIMQRIAVPMIGGMVSSTLLTLIVIPAIFGLIKGFRLPSTSHRGDRDPQSPAHQEAPAKRPRIMEPAQ

SEQ ID NO: 14638 - protein, 480 aa, BradyrhizobiumColbertium
MHTMNTSRLLTIIALGAGIGLTGYWSVERSFWPVHARLTDAAAAADKTPLYYRDPAGAPLWSAVPKKDQQGRDYLPVYDEDEPSTESAKPKRQQADSSRRILYYRNPMGLPDTSPVPKKDPMGMDYVPVYEGDDQEDGSVKLSPGKIQRTGVKSEPVERRSIRILVKSPGTIQLDERRVSVIAMRAVSFVQKVADVTTGTRVKAGQPLMQIYSSAVASAAAEYFSTITSKTTGGIEAYGRGSRQRLINLDVPEQVIADMEKSHVAPVTVQWSAPRDGIVLERNAIEGMRANPGDVLFRIADISVVWALVDVAERDLGNIAVGQPVTVRARSYPTRTFSGRIAVVYPQVNRETRTARVRIELANPDVALLPDMYVDADIDTADSKSELAVPDSSVLDTGSRQAVLVDKGEGRYEPREVKLGRRGGGYIEVREGLADGEAVVTAANFLIDAESNLKAALKGFAEAAPNPSVTGAAHSTGEHK

SEQ ID NO: 14639 - protein, 131 aa, BradyrhizobiumColbertium
MTSKFSSAAALTVVVTLVATAASAGAGDYVFEPVNAEMKKGDDVTVAVRLTNKTTGKPVSDAVIFRTRVDMAPDGMAEMESPVAPLPSSESGVYAFKTDLPMAGRYQVTLSAKVQGESETINGKVIVKANK

SEQ ID NO: 14640 - protein, 121 aa, BradyrhizobiumColbertium
MRLVRTILAFAIAASLALLPVGASAAGFGVMADDAQSGMQMGTSADMSMDCCPDDMNGAPFHAAGHNCSMGFCCAGGFVALGDVRSIGFRFVPAAESKVAIPADQFVPVRGASPPFRPPRV

SEQ ID NO: 14641 - protein, 91 aa, BradyrhizobiumColbertium
MRTDIKASSQKRLNRIEGQVRGLAKMVDEDRYCIDIVTQISAVRVALRRVEEEILKDHVAHCVEHAIRSGDKADQRRKIAELMEVVGRADR

SEQ ID NO: 14642 - protein, 309 aa, BradyrhizobiumColbertium
MDPATASHKVEHGGRTFYFCSDRCRTKFAEAPAKYVHGKVQHEPRADVPEGTVYTCPMHPQIRQIGPGNCPICGMALEPEFATADAGPNPELVDMTRRFWVGLALSVPVVILEMGAHLVGAHRWIDQAFSNWIQLALATPVVLWAGWPFFVRGWQSVLTRNLNMFTLIAMGTGVAWIYSVVATVLPAAFPSTFRGHDGAVAVYFEAAAVITVLVLLGQVLELRAREATSGAIKALLDLAPKTARRIRADGADEEVQIAVLQPQDRLRVRPGEKVPVDGEIIEGRSTSRWSPESPCRSVRRSAARSSQAP

SEQ ID NO: 14643 - protein, 365 aa, BradyrhizobiumColbertium
MQDFDSPVGKGALGTVEGKKVLLGNATFLSSEGVDTSSLESEAERQRGEGATVINMAVDGTLVGILAIADPVKQSTPEALRELAAEGVRVIMLTGDNRTTARAVARRLGIADVEAEVLPDQKSAVVAKLHEQGRIVAMAGDGVNDAPALAAAEVGIAMGTGTDVAMESAGVTLLKGDLTGIVRARRLSRATMRNIRQNLFFAFAYNAAGIPIAAGLLYPTFGLLLSPIVAAAAMALSSVSVVGNALRLRTVRSDAREIAGHRRWPSEFASRRRCDRRIGSPLRVSIGDAVREQPGLRKASKKLDLGVVERSAGCLYGFDGFELIAEVHVPDFLCVLPIADFGPGHEDRVAGRRYLEIANVGSGLL

SEQ ID NO: 14644 - protein, 396 aa, BradyrhizobiumColbertium
MTDLLRVLIERWREDSGSTYRTWFLWDERLKNFRSIRRGIAQVVEEIEAGTFGNVYKGSSLETIVGSIAEQRQIFKGADHAFLWKPKLRIPDIYENPENQRAFGRLLHHCSCCSTEQELVEGIESIDRLSIKGLGPAVANLLYFLHPTLMPPFNTAIVNGFNAITGAKVKLGRWDQYLGMRRGILELNRSYRDLLSNDLGAIAGFLFDVGTGRFSAPPVGSGDTARDAWLSELSKARETAKRLEGPIAAARENDLTHTEVQAWLRDLGLALGYRIWIASNDRGRPYNGAMLAAGCLDRLPSSIENAAGAESIRLIDVLWIDSASDCVAAAFEVEHTTSIYSGIVRMLDLALSSDLHATGGLFLVAPDGREDEVRSQLRRPRLQSRSGPQGAFLALR

SEQ ID NO: 14645 - protein, 621 aa, BradyrhizobiumColbertium
MIALPYDYFLIAWFAIALISTAYVAYDQFAGNPEPTVMKWAFILVTLYMGPVGLLLYVLADKEPRPGEHERFTSPLWKQGVGSTIHCVAGDATGIILAAATTALLGLPMWIDLVVEYLAGFSFGLLIFQSLFMMRMMGGSYWQNVKMSFMPEFISMNAMMAGMAPTMSLLMMGRDMRAMDPLELVFWGVMSLGVMVGFTAAYPFNVWMVGAGIKHGLMTERRTGSSQASEHDKKGQRHASHGGGNGHGGGHGMKSQATGPQLAAMAGVTGFILMTGMIWPGFYVNLRLSARDVEGAIMPPGMINTFDLPGAAMREMAAVKPRQVSYVAPITARGDQVLQPRVEGGVKVFEIEVSAIRWNILPDVSVDAYAYNRQIPGPRLVLTEGDHVRINFHNALPESTTVHWHGLIVPNEMDGPAKVTQQPIPPGGSYTYEYTVGQHGTYFYHSHDHPDRQQALGLYGALIIAPKDPAAELNADLDYTIQLQEWLKREWLTYPAMLMEGALPNYFTINGKAFPATDVVPMKVWQAIKLWFIGTHNNFVHPMHVHGGPFEVVAVDGITLAERARYQADTVNVGPGQRYDVIWTARKPGKWLVHCHIPHHTANNNVEQDGGGGLMLVLNVQ

SEQ ID NO: 14646 - protein, 83 aa, BradyrhizobiumColbertium
MLTPALIRAARGLLGLDQAEVAERAGLKQRTISKLEGETDFSLKDLRRRKALKAIRDAFEKAGIEFMFPSETSGEGVRKKSPG

SEQ ID NO: 14647 - protein, 104 aa, BradyrhizobiumColbertium
MHYASYMGSDAWRRNPARLKALSDADGHCRLCHADGSLEVHHSTYKRLGRERDNDLIALCSDCHRDVTSILRERRYAAVKPKRADVERLHDARILLGDPTAGGY

SEQ ID NO: 14648 - protein, 191 aa, BradyrhizobiumColbertium
MQRETIRFRIVGTKRLLMHCGRLADPLDPITQDLARLTSKRPKTIADHKMISKVEWFGSLWLHDGAPCLPAEALLACAIGGAKVLKRGPQAAAGLAIEEDAVLVYDGPTDVDELWENGDFLFRCGVKVGANAKTMRTRPCFKDWSAEFTASYLPSVIDREHVIQALAQAGVRRGLGDWRPQNGTFEVKQIE

SEQ ID NO: 14649 - protein, 149 aa, BradyrhizobiumColbertium
MKTHKTKKAPVGRGRRRCEPPPIGPLLWWRTIRADHFNVAAAGALRASIANVFIPGEPTWRDAADGDEAAAVGLALRLHKGTSPVTYDLVMTALAACAAEDGAAACLAMAHMLRGFPGAGRAEARIATSWLVRSFMKTTSSEEETGSGR

SEQ ID NO: 14650 - protein, 252 aa, BradyrhizobiumColbertium
MIAQIMSDLHLGPGSEAPPPLVDGVELVVVAGDTCEGLVKAVESLRAAYPDVDIAMVAGNHEFYGRVFKEELEAGRKRAQELGVHLLENDTATFGRLRIVGATLWTDYRLFGPDLQQAAMRAAYDQMRDHKRIRWNREPWQRFRPQEALSLHARTRNFLEAELARRHDGPTMLLAHHGTTWEALDPINERSLLAAAYVSDLRLTASADFVVTGHTHRPMNFRRERTHFISNPRGYRDEGVRFDPSLVIEILP

SEQ ID NO: 14651 - protein, 779 aa, BradyrhizobiumColbertium
MTQPIYTALESFPDHPPSGSRASGDRRQRAVEADDVPTSAMGALELETYRKCWLASSRFRRHNTEVAAERERERAIGLAEKEARAAIEKAMRTGKGFPRSASRSGHSSSSRSSIEDVDDDQDESLRRISDAERYPPNGGLVAARLLFSRIFDRRPALLDALRSGAPAILIDVGDALMLDRVAMVWRSILFESTTRFMDLARDPVKRREDLDALYLVVKEPPKSTSKISLDTTALSMLAFALPLIAISPLARSHLPEAVNAAATDRIDFPPLDATTIVRTIRIVTGKTCPQAIADGTLTHTSIADLDIAVRFDRTPQECLAELRRLNVAKIAKKKSRELTLSQLHGLGEAREWAEEAISDIEAWKRGEISWSAVPSGVALNGPAGCGKTTFAAVFAASAGLNFVSATLAKWQSSGEAHLGHLLRAMRQDFEAARARAPSCLFIDEIDSFPDRAGVTHSHRDYVIEVVNALLAEIDGIAGREGVVIMGASNDIGRCDPALLRAGRLERIVQIGLPDIPELEKMFRVRLGADLVDEDILPIAELAAGMTGADVERVVKDARRAARRDGGRSLVFDDLQKALVEDDDRPHELRWRTCVHEAAHILVDVIHFGPQNVFARVAKMQGRFGMSARRNNGYSSGTTEEYRKRLEVILAGRTAEQLICGSASHGAGGVPGSDLDSATGLACAMVGSFGLAGPTPLTYLGPARDAGTFLAFAEIRTAVNHELSEAARSCALLLKENRSVLEAIARRLAAHGRIDGAQVATLLAEARRDGLPSGRGGAEP

SEQ ID NO: 14652 - protein, 305 aa, BradyrhizobiumColbertium
MTVAAARIPADAADPERLAELLESTGDYRVLRRMRPPSFPAPNGCPTKRAIFVDVETTGLDKVKDSVIELAMLPFDYTIDGTIVGVGEPFSSLQDPGFPLPAEITALTGITDEMVHGASIDPSEVTAFANQAVLAISHNAGFDRPFCEREWPVFAAKPWACSLHEVDWSAEGFSGKKLSQIATGYGFFFDAHRALDDCRAGVDILARRLPRSGRTGLAALLESARAARWRVWAEGAPYTSRDILKARRYRWSSGDDGGRRAWYLEVGEDTLEGELEYLRREIYGREAVEIARHRFTAFDRYSIRG

SEQ ID NO: 14653 - protein, 99 aa, BradyrhizobiumColbertium
MESADVVLMKSDPYDIVGAIELSRATLRKMHQNLLWAVAYNVVAFPMAAGVLYPLVISPEVAALAMSGSSALVAINALLLKRARLEGIHRPHPQAVVKG

SEQ ID NO: 14654 - protein, 68 aa, BradyrhizobiumColbertium
MGPGAASVTILTEAMESPDRSIRMPAMEMPFHVTNRRMLKGLRPGDLVEFEAARLKNALMVTNIRKAR

SEQ ID NO: 14655 - protein, 478 aa, BradyrhizobiumColbertium
MKRFVEGLDRGQSTLFPASLDDYVTEDNPVRAVDVFVDGLDLDKLGFVGVQPLDTGRPSYHPGTMLKLYIYGYLNRVPSSRRLERECQRSIEMIWLTGQLAPDFKTIADFRKDNGKAIREVCREFVALCRKLDLLVAASVAIDGSKFKAVNARDKNFTEAKMKRRLERIDESIARYLSQLETADRHGDAVPEAKVARLKGKIEKLKEEIVRLNAINAEMMKSEDKQISLTDPDARSMATSGKDTGIVGYNVQIAVDTQHHLIVAHEVTNVGTDRHQLANMAGQARDEMAVETLEVVADRGYYDGEEIRACEEADITVTLPKPMTSGAKAAGRFGKQNFVYVAADDVYRCPAGERLTYHYTNVEDGKTLRRYWTSTCKTCALKAQCTTGPERRITRWEHETVLEKVQDRLDHNPNAMGVRRQTAEHPFGTMKCWMGATHFLTKKLPKVATEMALTVLAYNMKRVMMIVGVGGLLEAMQA

SEQ ID NO: 14656 - protein, 181 aa, BradyrhizobiumColbertium
MRPGQPARRSHDYTRHGTTSLFAALDIASGRVIGKCYGRHRAAEFRKFLDEIEAAVPRELDVHLVMDNYATHKTPLIRKWLVKRPRWHVHLTPTSSSWLNQVERFFALLTDKKIRRGIYRSVAALRADITSFIDRHNADPKPFRWTKSAVTSLLPSNASADTMPRQNTTRCRELLVQAQAV

SEQ ID NO: 14657 - protein, 39 aa, BradyrhizobiumColbertium
MFGDPTYADAVLDRLVHNAHRLDLTGESLRRTRQSARKT

SEQ ID NO: 14658 - protein, 261 aa, BradyrhizobiumColbertium
MNRIPHVASIALIVLSGAAISAPAGAQTAPSYTEAAPWYLRSPSGINFPDQQPFSALRFDKLEWGGPNTGASARWDMEAFVGTDYDKLFFKSEGFYNGKARNLEEGQFQVLYSRLLTYYFDAQFGVRQDFSKKSSRTYAVIGVEGLAPGFIEIDADAYISQKGEVSASITAFHDLLITNRLILQPRIDVKLQAQPVADLELGAGITDFELGARLRYEFTRNVAPYIGVNWDRKVGQTATIARNNGEAVSNVSFVAGVRLFW

SEQ ID NO: 14659 - protein, 390 aa, BradyrhizobiumColbertium
MNIPSIDFDLGEDISLLRDTLRAFVEAEITPRAAEIEKANLFPADLWKRFGDLGLLGMTAPDQYGGSNMGYLAHIVAMEEISRGSAAVGLSYGAHSNLCVNQIRRNGNDAQRQRYLPKLISGEYVGALAMSEPGAGSDVVSMKLRADKRGDRYVLNGSKMWITNGGDADVLVVYAKTDPEAGPRGMTAFLIEKGFKGFIHGQHLDKLGMRGSNTYPLFFDECEVPEENVLGKVGEGVKVLMSGLDYERAVLSGGPLGIMAACMDAVVPYMHERKQFGQPIGDFQLMQGKLADMYSTWQATRAYVYAVGRACDRADHARTLRKDAAAAILYSAEKATWMAGEAIQALGGVGYTNEFPVGRLWRDAKLYEIGAGTSEVRRMLIGRELMAETA

SEQ ID NO: 14660 - protein, 452 aa, BradyrhizobiumColbertium
MPLHSSIDPSSSDFARNSEAMRALVADLREKLSQVAGGGGEVSRNRHTARGKMLARQRVDLLVDPGTSFLELSPLAAYGLYGGDVHSASVVTGVGRIAGRECVIVANDATIKGGTYYPMTVKKHLRAQDVARQNNLPCVYMVDSGGAFLPLQDEIFPDERHFGRIFYNQAQMSSQGIPQIAIVMGSCTAGGAYVPAMSDESIIVRNQGTIFLGGPPLVKAATGEVVSAEELGGADVHSRQSGVTDHYAQNDAHAIGIARRIVGTLKPPARPNLNMHPPREPLFAAEEIYGVVPVDGRKPFDVRDIIARVVDGSEFDEFKKLYGTTLVCGFAHIWGYPVGIIANNGILFSESSLKGAHFIELCCQRGIPLVFLQNITGFMVGKKYEAGGIARDGAKLVTAVATASVPKFTVVIGGSYGAGNYGMCGRAYSPRFLWMWPNARISVMGGEQASMG

SEQ ID NO: 14661 - protein, 49 aa, BradyrhizobiumColbertium
MSCPSHHILNRPNFVGSIGAFDAAERPRPSTRRVSAGSITPSSHSRAVA

SEQ ID NO: 14662 - protein, 667 aa, BradyrhizobiumColbertium
MDSSKLYRRFRTLLIANRGEIACRVIRTARAMGLRTVAVYSEADRDAMHVALADEAVLLGPARARDSYLNIDRLIEAARKTGAEAVHPGYGFLSENAGFAQACLDAGLVFVGPTAGMMNAMGSKSGSKELMEKAGVPLVPGYHGEAQDEATLAKAADRIGFPILVKASAGGGGRGMRIVRSADELGPAVVSAKREAKAAFGDDRMLIEKYVDNPRHIEVQVIGDSHGNLLSLFERECTLQRRHQKVIEEAPSPTLNAAQRETVCAAARKAAGAVNYVGAGTIEFVSDGKDVFFIEMNTRLQVEHPVTELITGIDLVEWQLRVAFGEALPLRQDEIRLNGHAVEARVYAENPTKNFMPSVGRISTWRLPAEAGGLRIDAGYREGDSVSPYYDAMLAKMIAWAPTRDVAIERLNRGLEESDVRGIVTNIPFLSALMTHPKVRMNAIDTGFIERELAVLTQAAPVPGELELCAAVAAILKDEQQAARAQANSPWQTFGWQPVGRRQRSFAFRVGHGPEQKIVLNYGSGPSTLLIGERELAFAIAPRDGGFDLTLDGVKSSVAAVIDGHELYLRTRNGRFDLHWVDPFGGETEEQTGEDKIAAPLPGTVVAVLAEEGAKLDKGAPILTLEVMKMEQTLRAPFAGVLKSVKCKVGDIVQEGVELAVVEPSGE

SEQ ID NO: 14663 - protein, 303 aa, BradyrhizobiumColbertium
MSDRVRIIEMGPRDGLQNEKTPVSVEARIAFIEALVEAGLDTVEVGAFVSPKAIPQMASSDAVLRGVSHVKDAEFHVLVPNEKGYDAARAAGARVVSVFAAASEGFSRANINCTIAESIERFKPVLARAKADGVPVRGYVSCVLGCPFDGEIKPKAVADLASTLFELGCYEISLGDTIGVGTPTRAKEMLRAVAANIPPARLAMHFHDTYGQALANLYAGMEEGVSVIDAAAGGLGGCPYAPGATGNVATEDVVYMLEGMGIRTGIDMEKLLAATNAMSGLLGKPPVSRVASALNAKKKRAAS

SEQ ID NO: 14664 - protein, 81 aa, BradyrhizobiumColbertium
MTIRTRIVLGVSAAALSLGLAFAPAAFAQDKMGKDDGMMKKDTMSKDGMMKKDTMSKEGGMKKDHMSKDGMKKEDGMMKKN

SEQ ID NO: 14665 - protein, 115 aa, BradyrhizobiumColbertium
MSGFREPGFADRQKAAQEARKNLLNKFKSQPGPDDPAVAAKRAEREALAAKRAEAKAAREAEKAEQKRREEEAKAAEAARIAREAEEAEAQRAALEAEQKAKRDARYAARKAKRK

SEQ ID NO: 14666 - protein, 78 aa, BradyrhizobiumColbertium
MTFSRPNLKALSIAFVLASLTGAAVLLARPQPIESAVLGADWECTQTAFVLTSCAPRDLQAIPAVETSGKEAIPSRRG

SEQ ID NO: 14667 - protein, 76 aa, BradyrhizobiumColbertium
MRDQVAMSKPELGQKPKPAGRPRPVGNRRGAIAGLIITLVILAVGWWLARHLTSASKMQDCLMSGRTNCNVIEPAR

SEQ ID NO: 14668 - protein, 256 aa, BradyrhizobiumColbertium
MSASKRIKIIIPVASAMSFLALSAQAQDSRPRDAGPAAARPSAGAPAPTDQNMRKGLPPQQQAVRPAQRPADRPHAGPGAHHAGGPPPGRHVARGPAPERHWGGHIYRGNRAWDGGRWRHEVRNGRSGWWWDVGGVWYYYPQRMAGPPAYISEDYIDDVPVAYAPPPVAYAPPPPPPAPADPGASALGGALVGGLLGGLISGNATGAAAGAVLGGATGAIAGATAASQPGYYWAQGTCYYRYPNGQYVQADPRACY

SEQ ID NO: 14669 - protein, 77 aa, BradyrhizobiumColbertium
MPGWMREAGSLATRIAGELVPCQGQLDEPLPVRTFGLRSALHCELGFMLRIVLGAHEADPNRPSGQARGNFVRMIAG

SEQ ID NO: 14670 - protein, 70 aa, BradyrhizobiumColbertium
MTDPELRAQSFEIAWRYLDQSGLLTGEHKDSARFILSRIDRMMQRGERRRLLLSNAAIDAYRLRPALVTA

SEQ ID NO: 14671 - protein, 75 aa, BradyrhizobiumColbertium
MSEIREHMKIIGKDGAHVGTVDRVEGNRIKLTRKDSPEGHKDHHHYIDTKYVGAVEGDVVKLSMNADAVPKTEAA

SEQ ID NO: 14672 - protein, 433 aa, BradyrhizobiumColbertium
MTPDQICQKRMETIQAYLQRKHEELRLLNGCLRNRIDLVRPQSVDDVVGSKFRITAALRAEHELHEWKATETAWSHTANPASGPFEFGYDYQRADLTVRGPPFYEVDCASTSTAIYTASGMAAISAALLASAQIAPKADILVLPGSYGETLELIRSYVAHLRLEALKLPLGDAFARAGRPRILLLDSCSLAGAFEAALRCDGSGLDLLVFDTTCFAGRSGRIRRVLSWARRHGIPLVLVRSHNKLDSLGAEYGRLGSAVFVHENERQQRAGGLEWARLASETRNAVRLLGGAALPAHFPPFAGSAAYWALTKRRVAAILRNGRSTARYFAAKLPALSAELHFAHGLYVTLRGRRPLDEAAARQAAEDMSSELRREGFPIRHAGSFGFDFAATEWFHDATTDQYSVRVAVPDLPTELWNDLAAAIARWWLAHQA

SEQ ID NO: 14673 - protein, 72 aa, BradyrhizobiumColbertium
MAIASAVAIVAMSYLAIDAGVVNTNVVKKPIEVAQASIVGAAMGQHHLAFAVQEWARGGQEKPALEQCLATD

SEQ ID NO: 14674 - protein, 1734 aa, BradyrhizobiumColbertium
MIALLRAVTLCATLAFGLSAAQAADKAFKRDDLADSAIKLEAQIKSEAGPVAKTSATLKTDADAAFRRNDYRTGLSVLGQIAATTPEDAGNWLRLAKVIFQITPKSSSEQTFLLERASTAAYIAYQRAGNPGVEADALAVLGKSFAERKLWRPALDALRLSLDMREVADVRGQYEKMRDEHGFRLLDYTVDSDSASPRACFQFSEELAKRTDFAPFLALAGQDKPALSAEGKQLCVDGLKHGERYNVNLRAGLPSTVKEGLPKSAEFNIYVRDRKPFVRFTSRAYVLPRSGQRGIPVVSVNTPAVNINVFRIGDRNLINTVVDSDFQKTLSKYQLSDLGDERGVKVWSGELATAMTLNQDVTTAFPVDEAIGELQPGVYVMTAAAKGPGSDDDYQIATQWFIVSDLGVSAYSGNDGIHVFVNSLASTDPVGKAEVRLVARNNEILATRKTDESGHVLFEAGLARGEGGLSPALLTVTGEKADYAFLSLKSSAFDLSDRGVSGRTVPAGADAFVYAERGVYRSSETVYLTALLRDGQGNAVTGGPMTLVIERPDGVEFRRAVLADQGAGGRTLAVPLNSAVPTGTWRVRAFTDPKGSSVGETTFMVEDYVPDRIEFDLSAKDKLIKANVPVELKADGHFLYGAPASGLALEGDMLVAPASERPGFAGYQFGVDDEETTSNERTPLENLPEADANGVATFPVTLDSQPASTRPQEAQIFVRMVETGGRAVERKLVLPVAPAAAQIGVKPLFGEKNVAEGDKAEFDVVFVSPEGKQLARDGLRYELLKIESRYQWYRQNNYWEYEPVKSTSRVADGDVAIAADRPTRISLSPQPGRYRLDVKSNEADGPVNSVQFDVGWYSDGSADTPDLLETSIDKPQYASGDTMTVSVNVRSAGKLTVNVLGDRLLTTQTIDVKEGTAQVKLPVGKDWGTGAYVVATLRRPLDAAAQRMPGRAIGLKWFGIDKQTRTLQVKLTPPALIRPNAALKIPVKLDGLNPGEDAKVVIAAVDVGILNLTNYKPPAPDDFYLGQRRLTAEIRDLYGQLIDGMSGTRGQIKSGGDAGAGELQGSPPTQKPLALYSGIVTVAADGTAEVSFDIPEFAGTARVMAVAWTATKVGRANTDVVIRDPVVLTTTLPRFLLNGDHGTVNLEIDNVEGQAGDYAINVKTGGPVKMTGNPATTVKLAAKQRNSFSLALDATAAGQATLDVDIKGPNGLALARHYAFDVKPATQVLARRSVRTLAKGESLTLTSDMFSDLVPGTGSVSVSASLSTALDAATILKALDRYPYGCSEQITSRAMPLLYVNDLAAGAHLAMDTEVDQRIRDAIERLLARQGSNGSFGLWSAGGDDAWLDAYVTDFLTRAREKGFAVPDVLFKNALDRIRNSVVNADEPEKDGGRELAYGLYVLARNGAAPIGDLRYLADTKLNNLATPIAKSQLAAALALVGDRNRAERVYGAALDSLAPKPALEFGRTDYGSQLRDAAALVSLASEGNAPKATLTKAVVRVETARGLTPYTSTQENAWLVLAARALAKENLSMEVDGQPVKTALYRSYKAATLEGKPMKITNTGDAPVQAVVSVSGSPVTPEPAASNGFKIERTYFTLDGKPADISKVKQNQRFAVVLKITEAKPEYGHIMVSDYLPAGLEIDNPNLVSSGDSGTLDWIEDGEEPEHTEFRDDRFTAAVDRASDSKSVFTVAYVVRAVSPGKYVLPQAYVEDMYNPSRYGRTGTGTVEVRAAK

SEQ ID NO: 14675 - protein, 703 aa, BradyrhizobiumColbertium
MDGRVKPGHDGRRGRIAFRLLSAAAFTLILALVGFVGWVYSLGPLPLDEARRVSTTIVDRNGKLLRAYAMADGRWRLPVDAKTSVDPTYLKLLFAYEDQRFYAHNGLDPLALGRAALQLGTRGHIVSGGSTISMQLARLMEPRRQRSLYAKLRQIVRAIELERTLSKEQILDLYLALAPYGGNLEGIRAASIAYLGKEPKRLSLAEAALLVALPQSPETRRLDRHPEAARIARDRVLDRMVGEHQVSAEEAKQAKAVPIPKLRKPMPILAPHASDAALSMIKDKPVVKLTLDANLQKVLEPLARDRAIALGPNISVGIIVVDNESGNVLARVGSADYFDESRAGQVDMTRAIRSPGSTLKPFIYGLAFEDGFVHPDSLIDDRPARFGSYAPENFDMTFQGTVPVKKALQLSLNVPAIVLLDRVGSSRLASRLRQAGGNLVLPKDEAPGLAMGLGGVGVTLQDLAQLYAGFARLGTTRPIREIMSDKDDREPMRLLDQVAAWQVGNVLLGTPPPENAAHNRIAFKTGTSYGYRDAWSVGFDGRMTIGVWVGRPDGAPVPGLIGRVAAAPILFDAFARSGKTLVPLPKAPKGTLVASNAKLPLPLKRFRPVGELVRAGSEQPLHIQFPLNGSRIDVDRSGGRESAAMPVKVAGGVLPMTVMVNGTALGEIDGRRQRLIDPPGPGFARLTVIDATGAADTVVIRIQ

SEQ ID NO: 14676 - protein, 554 aa, BradyrhizobiumColbertium
MRMLDIVTTSHARAVGFLVLCALLLFLPGFFTIPPIDRDEARFAQATKQMVESGDYVDIRFQEDVRYKKPVGIYWLQSATVEAASLLKLPRAELRIWVYRLPSLMGAIGAVLMTYWAALGFVTRRAAVLAALMMCASVLLGVEARLAKTDAMLLFCVVAAMGAMARAYVSWQRAEDETHPPWSWPAIFWTALAVGILIKGPLILMFAGLTIVALAIQDRDASWLWKLRPVWGLMWMLVLVLPWFVAIFWRAGDTFFTTSVGGDMLSKLGAQESHGAPPGLYLVLFWITFWPGAPLAAMAAPAVWRARREPGAQFLLAWLIPSWIVFEAVLTKLPHYVLPLYPAIAILTAGAVEQRVLSRSWLARGSAWWFAIPAGASIIAVVGAVILTRQPAFVAWPFFAAALIFGLFAWWLYDNNRAERSFLNALVAALMLAVAVYGIVLPSLTPLFPSIEIARALRNVTCVGPKAAAAGYHEPSLVFLVGTRTLLTDGSGAADFLGQGSCRFALIEQRSERSFVQRAEAIGLRYKVGARIEGYNFSQGRAISISIFRSEGTE

SEQ ID NO: 14677 - protein, 281 aa, BradyrhizobiumColbertium
MRAPADSAPRAGYPAQVLAVTRRGLAQLVRSPSHSRRAEAARKLARHSLWLAVAGSIAIIALMVTFDQTEIQLMPPRGTPSLWPIRILTDFGKDEYLLSVLGAALVVLAFVAAGLHGTRRALLLGFGTRLQFLFLSVAVSALVTEILKYVIGRGRPFVGGTPNPFNFVPFEGTGAYASLPSGHAVAAFALAFAVSSLWPRLRAFMFTYAIVILLTRLVLLAHHPSDVVAGALVGTAGAMAVRYWFAARRLGFAIRSDGTIVPLPGRVSNRLKKVARGASAT

SEQ ID NO: 14678 - protein, 245 aa, BradyrhizobiumColbertium
MSTSQPSVSIVVPVRNEADNIAPLIAEIGAALDGRWPYEIIYVNDGSTDATGERLAAIMKQRSNLRQLRHARSGGQSAAVRSGVRAARGEIVATLDGDGQNNPAFLPDLIAAVEKGAGRVGLAAGQRVGRKDTGFKKFQSRVANGVRNAILKDGTRDTGCGLKAFRRDVFLMLPYFDGLHRFLPALVRREGYDIAYVDVIDRPRHSGVSNYGFFDRLWIGIMDLAGVWWLIRRKKPTPEVTEVHA

SEQ ID NO: 14679 - protein, 112 aa, BradyrhizobiumColbertium
MIIQYGQALSNYLYDVFVAKFDFWLAFGLVAQLFFTARFLVQWIASERAGNSVVPMAFWFCSMGGGLMTLVYGVVKREPVIILGQSLATVIYIRNIMLIWKNRGTASKTLDR

SEQ ID NO: 14680 - protein, 560 aa, BradyrhizobiumColbertium
MVLLDLMGGVALLLWGLHMVHSGILRAFGPDLRRLLGKALGNRASAFAAGLGLTALLQSSTATALITSSFAAEGLVSLAAALAIMLGANVGTTLIVQVLSFNIAAVAPVLFVLGLVAFRSGPRSRIKDIGRVCIGLGLMLLSLHILLDTLAPAENAPGVRIVMSAITGDPILCVVIAALVTWAVHSSVASVLLIMSLAYSQFISPEAALALVLGANLGSAINPVFEGARRDDPASYRLPVGNLVNRVVGIGLVLPFLGDVAGHMHAWQPDLARMTAAFHIAFNVGTAILFIGLLDTMSRLLTRLLPDRVQEADPAGPRYLDETALETPSLALADAARETLRMGDFVEVMLRKVMTAMMSGDRALVDQVSKMDNLVDGLDEAIKLYVTKLMRGSLDESEGRRAMEIISFAINLEHIGDIIDKSLSELATKKIKRRFQFSAEGAEELAAFHKRTMDSLRIAFGVFMSGDATEARKLLVEKTALRNTELAAVERHLDRLREGRPETIETTSLHLDVLRDLRRIHSHICSVAYPVLDAAGEPYRRAEVDTVTLPASGAASALPR

SEQ ID NO: 14681 - protein, 394 aa, BradyrhizobiumColbertium
MDSSHPQEQHAETRLVTSGRDTKAQRGFVNPPVFHGSTVLYPTAEDLHAHRGEFTYGRHGSPTTKAFQETLMALEGPQCAGVGIVPSGLSAISTTLLSVLRAGDHILVVDNIYRPSRNFCNGMLARYGVETTYFDPLIGAGVDKLFKPNTRAVLVEAPGSQSFEIPDIRAMAEVAHARGALVIDDNTWATPLYHRSLEQGVDISMQAATKYIGGHSDIMFGTISANAKAWPQINEGIRLLGVCAGPDDVFLALRSLRTLSVRLAQHHRSGLDMARWLAGRPEVARVLHPGLETDPGHAIWKRDFTGASGLFSIVLKPAPQKAVDTMLNTLKLFGMGFSWGGFESLAIPFDCDSYRTATKWAPGGPTLRLHIGLENTDDLKADLDRGFAALKAAT

SEQ ID NO: 14682 - protein, 338 aa, BradyrhizobiumColbertium
MKRVTLALTLALAAGLSTQAADAQTLKTVKDRGMLSCGVSQGLPGFSSPDDKGNWTGIDVDVCRAIAGAIFNDPAKVKFVPLSAKDRFTALQSGEIDVLSRNTTWTISRDTSLGANFTGVTYYDGQGFMVKKSLKVNSALELNSASVCVQTGTTTEQNLADYFKANNMKYEVIAFATNDETVKAYEAGRCDVFTTDQSGLYANRLKLANPNDHMVLPEIISKEPLGPMVRHGDDQWFDIVKWTLFAMITAEELGVTSKNVDEKAKLENPELKRVLGSDGNFGEQLGLTKDWVVRIVKTVGNYGEVFDRNVGAGSPLAINRGLNNLWNKGGLQYAPPIR

SEQ ID NO: 14683 - protein, 401 aa, BradyrhizobiumColbertium
MSTEARKPPPQIALKIRRILGGRAGWNGVAVQFAFAAILGWIGYEIISNARANLENQHIAAGFGFLRNNAGFDVNQTLISYSGSDTFLRVFVVGLLNTLVVSAVGIVFATVIGFIVALCRLSPNWLLSRVSEIYVEVIRNLPLLFQILFWYLAVLAALPNPRQSISLLGIAFISNRGLVIPSAIGERGLEPFLAMLAFGVVASLALHFHARRALFRQGRVIRIWPYVLGLLFGLPLATVLMFGLPLTFELPQLRGFNFAGGSRIIPEFVALTLALSTYTAAFIAEIVRAGILSVHKGQMEAGSSLGLSRGATLRLIVVPQAMRVIVPPLTNQYLNLTKNSSLAVAIGYPDLVSVFAGTSLSQTGQAIEIIAMTMGMYLLISLFTSAVMSVYGWRVNRGLGA

SEQ ID NO: 14684 - protein, 506 aa, BradyrhizobiumColbertium
MSDVTSLSFVRRDLLAERPAPVKTTGFIGLMRTRLFNSPTNILLTVVGALLLWFTIVPSVKFLMVDAVWTGQDRTACLPENAGFVVGACWPYIQAKLPQLIYGFYPEAERWRVNVTFLLSAVLLVPLLVPRLPAKGINASLFFVAFPVVAFFLLYGGGIKGFGLSWTAGLLQLFDESIIGAGQALLNLSKTSAIGPLLWSLGSLIMLVGTAISWLIFPLTWLSDHIQGTAQPVWIDFAVTAAIVSLVAFVLGGGVRAGGRALVTSVAVFIGIAVVIQLMGLDRGGLPVVSTNLWGGLLVTLVVSVTGIVTSLPIGIALALGRRSTIPLIRIFSITFIEFWRGVPLITVLFFATYMLPLFLPGNFSVDGLVRALIGIALFTGAYQAENVRGGLAAIPRGQSEAAAALGLSWWKTTSLIVLPQALRHVIPNLVNSFISLFKDTSLVSIVALFDLLGSLRASFSDPKWSTPSTAFTGFAFAGIIYFVFCFGMSRYSLFVEHRLNAHRRN

SEQ ID NO: 14685 - protein, 245 aa, BradyrhizobiumColbertium
MSDPIVKISGLNKWYGEFHVLRDIDLAVNKGERIVICGPSGSGKSTLIRCINALEEFQEGEIVVDGIELGPNLKHVDAVRREVGMVFQSFNLFPHLTVLDNCTLAPIWVRNIPKKDAEAAAMKFLERVKIPHQANKFPGQMSGGQQQRVAIARALTMNPKVMLFDEPTSALDPEMVKEVLDTMVDLAEEGMTMLVVTHEMGFAREVANRVVFMDAGQIIEANTPNEFFAAPQHARTKLFLSQILR

SEQ ID NO: 14686 - protein, 79 aa, BradyrhizobiumColbertium
MAAVGLEDWVAEDDEGYAAIAYKYATQPACLAKLRNELPARIAASPAGNVEIYTRKVEAGYRQFWRDYCAAGSEHGAMV

SEQ ID NO: 14687 - protein, 382 aa, BradyrhizobiumColbertium
MSGRFAPVRRTAKAFPFGLPSTTFSPDLINPLVAIFPDMPIRNDVVEAIGNTPLIKLKRASELTGCTILGKAEFMNPGQSVKDRAGKWMILEAEKRGELKPGGLVVEATAGNTGIGLAVVASARGYRTLIVIPETQSQEKKDFLKLCGAELIEVPALPYANPNNYQHVGRRLADELRKTEPNGVLFADQWNNLDNAKAHYESTGPEIWEQTAGKVDGFVCSVGSGGTLAGVSRYLKEKSKTIRIACADPHGAGMYEYFRTGEAKATPGSSITEGIGLNRATAIVETAKVDDAYLIPDAEAVSAIYELLQHEGLCLGGSTGVNIVGAMRLAKQLGPGKTVVTMLCDSGSRYQSKLFNADFMRAKNLPVPEWLEKRSNIKPPFV

SEQ ID NO: 14688 - protein, 492 aa, BradyrhizobiumColbertium
MTLEVPAIAARRFLGSPSWTLRAARWIAVLCLGAGSGACVLTQDLPDPALDVPAQYKYAGKGDAPPSLDWWRGFRSAELTQLMQEAQTVNLDIAAAVARIVQADAQARQAGAALLPSVSSGGSETYSRTSGSSASGLSIGGREVVNYSASLSASYQLDFWGQNRAALQTAEETANANRFDRDTVALTTLAAVANAYFQVLASQDRIRTSQRNIASAQRILDAVRERRNAGTGTDLDVAQQESVLANQKALVPPLRQTLDQNVNALAVLVSRPPESVRVHGGSLDRIAIPRVTPGLPSELLTQRPDIRRQEAQLASATANIGNARAQFFPTIQLTGNGGYQSSALVSLFQPHAAFFQLVGSATQPIFDGGRILGNFELAKARQDELLQIYRKTIIQAFADVDNALFSIKQTTIRLQLQRDVVAASRRAFDLSEQQLRAGTADIVTVLNTQLTLFQAEDALLQAQLARLLAIVSLYQALGGGWEPRMEKPVNAL

SEQ ID NO: 14689 - protein, 463 aa, BradyrhizobiumColbertium
MLFKPDAKQGAGEGRAKRSRARGFVVTLITLAILGGLGYLGWIAMHQQQANNRNQRPDLPVPVLAATPRIQDVPVFLDGVGAVRALNTVTVRSQVDGKLISVNFTEGQDVKKGDVLGEIDPAIYQAQYDQAVAKKAQDQAQLANQRIDLARYEQLAASNAGSKQQADTQRALVAQTEALVKADQAAIDNAAATLSYTKIVAPISGRAGLRQVDQGNIIRASDTTGLVVITQLQPIAVWFSLPQQQIMRVNAAAARGPLAVDVFGNDGVTVIDTGKLTGIDNLVDQTTGTLKLKAEFPNANYQLWPGQFVNVRLKVETLTQALVVPTSAVQRGPVGTFSYVIGEDNIVSAKPVTVTQQNEHDAVIAGGLSASDKVVTTGFANLADGSKVIIGRDDQTPSADLAPRKRSRGPDAQKKDGARDGQKNGQVKEGEFRAKRKSSEGDQKGQTGPAPGPGASGPGAKQP

SEQ ID NO: 14690 - protein, 1049 aa, BradyrhizobiumColbertium
MGVSEPFIRRPIATSLLGIALMIGGLLGYFALPVSALPQVDFPTVQVTTQLPGASPDVVASLITAPLERQLGQIPSLTSMNSTSSFGVSQISLQFDLNRDIDGATQDVQAAINAAAGVLPKTLPYPPTYAKVNPADAPVMTLALRSDTISLRAMSDIADTILAQRLSQISGVGRVSVLGGLKPAVRIQADLARLAAYGIAMEDLRTAIASANVSGPKGSLDGAQQSYIIAANDQIAAADAYKPIIITYRNGSPVTIGDVAQIIDGLENDRTGGWYQGAPAVIIDIQRQPGANVIDVVSQIRAEIPKVQRAIPAGVNLTIVSDRTVTIRASVRDVQFTLVLAVVLVTLVVLLFLRSLRATVIAGVALPLSLITSFGIMYFAGFSLDNLSLMALTIGTGFVVDDAIVMIENIVRHMENGDGPMEASLKGASEIGFTVISLTVSLIAVFIPLLFMSGLVGRMFREFALTLTIAVVTSAVVSLTLTPMMCSRLLKHSHEELAVPGLAAISRFIDRTVEAYHRSLLWVLERQRATLVVTFVTLIATLVLYVVAPKGFLPLQDTASITAVTEAGPDVSFAEMKRRQAEVAEAIRADPDVLGVVSVIGAGSVNPTTNVGRLVMGLKPRGERRDDITVVVARLKERVSGIPGMTVYFQPVQDVQISTQSSRSQYQYTLTGTDATLVSEWARKLVAEMRRDPLFRDVSSEAQEGGLRAQLDVDRTRAGQLGVSLQAITDTLNDAFAQRQISTIYGQANQYRVVLEALPMYQRDPSILSKLYLPGAASVTAGAPAAQVPLSAVATLKRTTAPLAISHQAQFPSVSLSFNLAPGAALGDAVEAVKTIETRIGMPNSIVGVYAGDAAEFAKALAGQPWLLLAAVITIYIVLGVLYESYIHPITILSTLPSAGVGAILALMLCGQDLSVIGLIGIILLMGIVKKNAIMMIDFALEAERGRGMSPNEAIVQACLLRFRPIMMTTLAALFGALPLAIESGTGAELRFPLGISIIGGLLLSQLLTLYTTPVIYLALDRINRRLEQALPPAESGGPPVAGATEGMQ

SEQ ID NO: 14691 - protein, 1034 aa, BradyrhizobiumColbertium
MASISEPFIRRPVATTLLSIGLFLLGVVAYQFLPVASVPNVDFPAIFVSASRPGADPSVMAATVASPLERRLGEIAGINQITSTSTLGTTSIQLQFDIGRNIDKAARDVQAAINASMVDLPTDLPTLPRFRKANTAGAPVFVLALTSKTLSASAIYDVADTVIAQRISQVPGVGDVTVSGADQPAVRVQLNPVALSSAGIATDDVRTAIVNANPLGPVGIFEGERQAETLALNRQMRTAKEFRDIVIKSSNGNFVRLSDVADIEDSVRNARSIAWFNKQPAVLIQITKQGDANVIDTVDRVKALIPALKQWIPAGVEISTLVDRTSTIRASVLDMQWTLLATSFLVMVVVFVFLRRLTPTIAAGISVPLALAGTCAGMWVAGFSIDNLSLMALAISVGFVVDDAIVMIENMYRNLEHGMRPFQAAREGAKQIGFTVVSISLSLIAAFTPLIFMDGIVGRLLREFSLTLTFAILVSTLVSLTVTPMICAHYIRQTTSGTATLFDRIIEGSLSRIVAFYARSLRAVLDYPLATLLVFFATIGLTVTLYIKVPKGYFPTDDSGFIIGATRASADISFQSMLSLQQRLADIVMQDPAVAGIGSTVGSGGGPGAATSNRGTMFISLKPPEERDHVSTQVVIDRLRRALYPVPGIRLFMFAAQDVRAGGRQSDSDYQYTLTSTDLGLLQKWAPIVAKRMESVEGITDISSNRDPGGLQLTLSIDRQKASALGVRVQDIDTALNNAFAQRQISIIYTQRNQYMIVLEIDPKFQVDPSNLDRIYVAGAGDAQVPLSAVVHATRGLAPLAVYHSQSFPSTTVSFNLLPDVPLQAATQNIQRAVEELHMPEGIRGSFDGNAGDFARTAGRQPLLILGALVAMYIVLGVLYESLAHPLTIISTLPSAGLGALLALQLTNTPLTVIAFVGIILLIGIVKKNGIMMVDFALDAERQRGLSSAEAIFEACQARFRPILMTTMAALFAGIPLVVATGPGTELRRPLGITIIGGLFVSQILTLYTTPVIYLLIDRLRRRSEPRPLAVPAE

SEQ ID NO: 14692 - protein, 255 aa, BradyrhizobiumColbertium
MQLQAYSAPMSNPPQTTAAPPETIPECPHCQKPMPLCICDSVVPIENRLSLLILQHPQEQDRALGTARLLAKHFADATVRVGLSWPSLSKAMGRPIENASHWAVLYLGSARAADLEAEGEIVALNRKGEVAENQRAILSKLEGIVLLDGTWSQAKALWWRNPWMLKCQRVILNPAHPSRYGRLRREPRSDGLSTIEAAATILAGLERRPDIAETLHASFERLLARYREVQAEMPELAPRPAAKGRRRDFRRRKRA

SEQ ID NO: 14693 - protein, 64 aa, BradyrhizobiumColbertium
MSEAEFNLMLDAVRDAMVFEDVAPVPEVEFVPRSWSLETTPKAANDNEGAWPLLPFPEGWYAAS

SEQ ID NO: 14694 - protein, 75 aa, BradyrhizobiumColbertium
MKARFLRFAGVKSRARGASTVGLFLTLFASSAHAQGTAVQRRAWTPDVYRLHAGEILNVHATGEACRAVLDQAGG

SEQ ID NO: 14695 - protein, 318 aa, BradyrhizobiumColbertium
MAGAMTFGGTGEMEKSVWPQARRGMARASTPWRKATLGAAVVFGLVVAAPLGAQAAPPAACAALQEKYPDWKGKTLVNAINPHTPGYETIDPKDPSKYIGFDIDLGEAIGECLGFKLTYKPVVFAALLTTLAAGQADIVISDIYATKERAKAADFITYSKVFDGVLVAKGNPKGINGINLSLCGAAAAENTGYVEVPLIQALIPECKKAGKPEPTIQLYDNNANCIQAILAGRADTYINDVNTVDSAVKAYPDKLEKAIAVTIPYSVGIAVPKNKPKFRDAVLAALIEVQKAGTHMALLKKHGLDVNNFMEPGILTAD

SEQ ID NO: 14696 - protein, 540 aa, BradyrhizobiumColbertium
MSLFLHYLSMPYLLAGIELTLEVTALGLGGGLILGLILASMQLSRFWLLAAIARAYTVIFRGTPLILQMVFAYDALPHIGIKLPAVLAAGLALACNEAPFIAEMLRAGVLGVDRGQVTAGQALGMTPRILMWRVIAPQAIRTMIPAFGNEAVSALKNSSLASVVAVQELTLRSTQLASSTFDFFSIFFASGLLYLVLTTAISVIQLFVEWLLDLDRTTRRQRKLADYLPWRRVDLGTKLELAAATAANPEPAPAELTDTPPLALTREERARRAATIARNNIAVEVKDLTKSYGSQTVLDGLDLTVRVGEVVALLGPSGSGKSTLLRCINHLESWDSGTVRVGGRRLGFSEHGKLLSPRAIANERASVGVGMVFQQFNLFAHLSAKENIAGPLRWVHGMTRIDADRRAAELLDRVGLSHRADALPRHLSGGQQQRVAIARALAPNPSVLLLDEPTSALDPELVNEVLEVIRRLAIDDGLTMIISTHQIRFADEVADRVAFLSGGAIIEEGPAHEVLSNPRSPLTARFLSVMEADKRPEAVR

SEQ ID NO: 14697 - protein, 413 aa, BradyrhizobiumColbertium
MKHFTLPVSPKTVHWGYFSKKVTPALTLRSGDRATIETLTHHANDDYERMIQGDPGAESVFQWTREHKAVARRGSGPVEGPFIRGAGEGIGVHLLTGPVAIEGAEPGDILEVRILDVRPRPSCSACHAGRCFGSNVAANWGFHYHDLIEEPKPREVITIFELDTSGEPYAKAIYNYVWTPQTDPDGIVHSTIDYPGVPVDHATIKKRKNILSNVKVPARLHFGTMGLAPSEADFVSSIPPSYTGGNIDDWRIGKGARMFYPVAVPGAYFSVGDPHAAQGDSELGGTAIETSLTGDFEFILHKKADLAGTSLEGLDHPMLETDQAWSFYGFTYPNYLAALGPEAQTEIANHSSLDRAMRDAFRKLRRFLMTVHGLSEDEAISLMSVGADFGVTQVVDANWGVHGTIRKNIFRCD

SEQ ID NO: 14698 - protein, 809 aa, BradyrhizobiumColbertium
MTSGDHLRPVATTDDRVLLARRLLRSTATWVDPMSFRPFTSESYAQDDRPEAWRDVLAAVGLQPAGGHDVFDGHASASHRRAAGIALTRMAAGAQSVGPLSRASEDIPIALMPVEDGMVLKSAGDHRIVPVGHLVLLPRSGDWSIVFQRDMRAIVLSVTSEALQGRLSGKPRLGEPRVVPPSGFAELFSRLLDATARTLDTLSDAEWDLVARSLADLLLTLAHQLAASNSDAGSSAAQAALLHRICQTIERRLEDPDLVPARVAQAEGISERYLQRLFETVGDNFTHYVRERRLQRAWADLSNPTAAHRSISEIAYAYGFGDSAHFSRAFRHRFGLPPREFRQQEAERAASQLGIAGQRGWPQEALAQLRAHQSVAARSSIAPGDGEKRATSERRHHHLPVEASRVHWGYFSRSLPPQIEIASGDTITIETLTQHASDDPELMIAGDAAAESVFGWTRNRKNVDRRGAGPMDASVFGRGAGEGFGVHICTGPVAVKDAQPGDVLEVRILDIVPRASRNPNHAGRVFGSSVAAWWGYHYNEFLGGPKPREAVTIYEIFDDAEVPHARALYSYRWEPQTDPFGVVHTTYDYPGVPVAPATIKRRHAVLDGIKIPLRPHFGVIALAPREVDFIDSVPPSYFGGNLDNWRLGKGATVYLPVSVPGALLSIGDPHAAQGDGELSGTAIECSMTGTFEVILHKKADLAGRPFADLSYPLIETATDWVLTGFSHPNYLAEFGAQGQSEVYAKSSLDLAMKDAFRKMRRFLMNVKGLSEDEAIALMSAAVDFGVTQVVDGNWGVHAILSKRLFEDAP

SEQ ID NO: 14699 - protein, 127 aa, BradyrhizobiumColbertium
MKFHMISGGPKPVAPFSHAVETDGFVFVTGQMPDTPQAPGVLPDGIVAQTRAVMENLKVVLAGLDLGLEHVVMARVYLTRFNEDYTAMNETYRAFFPPDRLPARTCVGVTGLAYEALIEIDLVCRRP

SEQ ID NO: 14700 - protein, 50 aa, BradyrhizobiumColbertium
MRTSHLVEDLHHPVISLKRCLQRSLGGRVGNEPVTQGRGSVAGRLLHGKH

SEQ ID NO: 14701 - protein, 384 aa, BradyrhizobiumColbertium
MKQSPRNAPSALRYRLVPDAAAKAALEATFQAYDRMMEILDEVARAHNVGSNVVLLHAHAYEPVRKQTGLPSRLVTLGLRDRAEYRAAQGRRLPLDDKLVKIKGPAAVSIATVQGRFSVPFDYAGYVEGWGQSVPAHLIRTDDGFEIHYGVTPNSLPEEENAMDTIAAAPENFLSRVGRLIAGIAYDAIEQAEGKNKLKVVGQAIREIERAETEARDALAAARAEEYRLNARRTEIERQMADLAPKIEAAVADSRDDLARAGIARQMDLEAQFEVLSRAIDENNEKIEQCVTSLRAVLSALQDAEQRRADLEKSEAAANHQTSASPRKQGGSSAAAKALRAGRAVARATGVPPGISYSSDIDELSTLHRDKEIAARLARLKSGS

SEQ ID NO: 14702 - protein, 219 aa, BradyrhizobiumColbertium
MSALLEHVMAPEVRPFAIAAAMIIIVGSIEIVSILVGASLSEILGTNIDFAHPSDNGVVNAISWINVGGVPLLIFLLLLLGVFSITGFLIQDIARMVAGPLPATAASVGAVVVSVPLVRAASRTIARLIPKDESYAVGLGDLVGRIGEVVIGPLDHGPPGRVSVADVHGNRHFVSAVAAPSSGPLPQGTMVLLVDRDGTRFVAVKADDELKPSKPSLSS

SEQ ID NO: 14703 - protein, 565 aa, BradyrhizobiumColbertium
MFDIAVPAMIGVALIVVLGIVFTILYKRATRDEAFVRTGLGGKKVVLDGGAMILPIFHSYACVNLKTLRLTVERKERESLITKDRLRVDIVAEFYVRVRPDEESIALASQTLGALTNDAEALRNQVEAKFVDGLRSVAATMTILELQEKRSDFVKHVQSTVESDVKSNGLELESVSLTKLDQTDVKFFNPENFFDAEGLTQLKTITETRRRDRNAIVRDNEVAIAQKDLEARQQTLTIERTKKEAELSQERDIANKTASTRAEVATATQTARLTEENARIDTDRAVAEKEAGAKQVKETAVIESDLAINKRRTDAQREIQIATQENEIQIAAKSKETSEAVAEAKTAEALAVSAEEKVVTARAVEVADRARLTQVLAARTEAERKSTEVIVAAEAEKRAALDRAEAITTLATAEAESNKIKAVGVRNIGEAEAAVITMKNEAQNKLGSNVIDFEIAKKRIETMPSALAEMVRPIANLKDVRILHTGGAFGGNGTGAGGNVGFGEGLAGELLKVHALRPMIDEILRQGGFAPDDDPVKALVGAVTGKSNGAAVPTPLPEKASAADL

SEQ ID NO: 14704 - protein, 59 aa, BradyrhizobiumColbertium
MPDIPVDRSHMAPSILPAGVPELSDDECLACLARAVETPDSARLGEVAALIGRLAVAIE

SEQ ID NO: 14705 - protein, 240 aa, BradyrhizobiumColbertium
MLQRCREFSSAASSALQGPQMSGFSTARQKMVDGQVRTNDVTDRRVLDAMLTVPREAFVPAARQALSYLDLDLDVSEGAAKRFLIKPALTGKLLQAAEIGEVDNVLVVGCATGYLAALSAKLARQITATECDSALAAKAKAAFTSLGLANIACRAAACPEGDPSAAPYDVIILNGAAEVLPEALLGQLKEGGRLVGVSAESKPPRAMLVTRTHGEFGHRTLFDAAAPVLPGLERAPAFVF

SEQ ID NO: 14706 - protein, 461 aa, BradyrhizobiumColbertium
MHGVKLFTGAAVSVLLLALAGPTPALAETMEGALVRAYQDNPQLNAQRAQVRSTDENVPQALSGYRPRVSLSASAGYQYSDFKSSSTSVPANGTGIPRSVGLTASQTLYNGNQTANRTRAAESQVSGAREALRSLDQNVLLQAATVYMDYLRDAATLEVQRSNVRVLEQTLKQTRDRFNVGEVTRTDVAQSEAQLAAGRTQALTAEANLTTTRANFRRIIGNEPTNLAPGSPVDRFLPPTLASAIELSLVEHPNVTAAMFGIDVNFLQVKVAEGALLPTVTLQASATQAYEQSLIQYRAFNAAAIAQVSVPIYQGGSEYSLIRQSKENLAQQRLNLETTRDQTRATVVQWWGSLQATKAQVQSAQSQVAASEIALNGVREEAKAGQRTTLDVLNAQQALVNARVALVTAQHDRVVASYNVLAAVGRLSPQVLGLRTTTYDASVHYHQVRDSWAGVRTPDGR

SEQ ID NO: 14707 - protein, 256 aa, BradyrhizobiumColbertium
MTQPAKVTEPSMEEILASIRRIIADDEAKPPPAEATKPEKAAAPAAPPKPQAMNDIPPSKVAPAKPAAEKPAPPAAKPAPAAPPAPAADASNSQDDIDALLAGLDAATPAPEVRAPEPEPEPEPEPDVLELTDEMVMDPTPPPPPPSFRKVEPRDDLEFAESPPRPTPPPSYAPVDFDAPPLPPQQPILAQSTVSAVESAFNSLAHTVLSSNARTLEDLVKEMLRPMLKSWLDDNLPGLVERIVKAEIERVSRGGR

SEQ ID NO: 14708 - protein, 958 aa, BradyrhizobiumColbertium
MIEKNYQPADIETRMSVVWEDSLAFKAGRPDRRDAVPFTIVIPPPNVTGSLHMGHALNNTLQDILCRFERMRGRDVLWQPGTDHAGIATQMVVERQLMERQQPGRREMGRAKFLERVWQWKAESGDTIINQLKRLGASCDWSRERFTMDEGLSKAVVKVFVELHREGLIYKDKRLVNWDTKLLTAISDLEVQQIEVKGNLWYLRYPIEGKTFSPDDSSSFIVVATTRPETMLGDTGVAVHPDDERYENLIGKNVILPLVGRKIQIVADEYSDPGKGSGAVKITPAHDFNDFEVGNRHGLRRISVLDREGCLDLLDNEDYLRDLPEGASQFAEEFHKVDRFAARKRIVERLESFGFVERIEPHTHMVPHGDRSNSVIEPYLTDQWYVDAKTLARPAIAAVRSGETTFVPKNWEKTYFDWMENIQPWCISRQLWWGHQIPAWYGPDGKVFVAETEEEAISHALGYYVEQEVITPEQGREMALDRNKREGFITRDEDVLDTWFSSALWPFSTLGWPDDTPEVQRYYPTNALVTGFDIIFFWVARMMMMGLHFMKEVPFSTVYIHALVRDEKGAKMSKSKGNVIDPLNLIDEYGADALRFTLAAMAAQGRDIKLATSRVEGYRNFATKLWNACRFAEMNHCAVPEGFAPAKAKETLNRWIAHETAHTTREVTEAIEAYRFNDAAGSIYRFVWNVYCDWYVELAKPMLLGPDSPAKDETRAMVAWARDAILKLLHPFMPFITEELWEVTAKREGLLALAPWPLKPVGPTPEQLAMLAATTGPTDALVSPAWVLPIFDHADFTDPAAEAEIGWVIDLITQIRSVRAEMNIPPATLTALVLAGASAETKERAPRWTDVIKRMARLSDISFADRAPDGAVQLLVRGEVAALPLKGVIDVAAERTRLDKEIGKADADIKRAESKLANEKFVANAAEEVVEEEREKREAALARKAKLLEALERLKQAS

SEQ ID NO: 14709 - protein, 200 aa, BradyrhizobiumColbertium
MAPISKISSPPLGKRLKRAFFSRSVHEVAPDLIGATMLVDGVGGIIVEVEAYHHTDPAAHSYRGPTPRNQVMFGPPGFAYVYRSYGIHWCVNFVCEEEGSASAVLIRAIEPTHGLAAMRRRRHLQDLHALCSGPGKLTEALGITIAHNALPLDRPPIALHARTEDVEVATGIRIGITKAVELPWRYGIKGSKFLSKPFPK

SEQ ID NO: 14710 - protein, 44 aa, BradyrhizobiumColbertium
MGNILLCSQAILTSNGSNLEDLIPASWQAAEAGLFQPQRSRGRS

SEQ ID NO: 14711 - protein, 318 aa, BradyrhizobiumColbertium
MVVIVDTISNPLRPRHPEKVNRPDSASPPKPDWIRVRAPSTRGYADTRNIVRSNGLHTVCEEAGCPNIGECWDKKHATFMIMGDTCTRACAFCNVKTGLPNALDAAEPQNVAEATAKLGLAHVVITSVDRDDLADGGAEHFAQTIRAIRVACPSTTIEILTPDFLRKDSALEVVVAAKPDVFNHNLETVPSRYLTVRPGARYFHSIRLLQRVKELDPTIFTKSGIMVGLGEERHEVLQVMDDLRSADVDFLTIGQYLQPTRKHHAVMRYVPPDEFSSYEKVAYTKGFLMVSASPLTRSSHHAGEDFARLKAARAANAR

SEQ ID NO: 14712 - protein, 156 aa, BradyrhizobiumColbertium
MPRFSSKRRVNHSAPEMFDLVADVERYPEFVPLCSALKVRQRMAKPDGTEVLVADMTVSFKLIKESFTSRVTLDRANLKILVEYLQGPFSNLENRWTFEPKGEGVCDVGFFLSYEFRSRMLAMLMGSMFDAAFARFSTAFEKRADAIYGRPKLAST

SEQ ID NO: 14713 - protein, 259 aa, BradyrhizobiumColbertium
MTINFDTLKASLILYGLNAIYAILLLAVGWYLSGAMHRFVARVLSVAHRVDPLVTLFVGSLARYGVLAVVGIAVLQLFGIQTASLVAVLGATSLAIGLALQGTLSNIAAGVMLLLFRPFHIGDDVEVAGKAGKVRSLSLFMTELVAPDNTQILLPNGQVWGAAIINHSTYPGTGEIKVTFPVPASAASALADRILNELRSDSRMDDQAAPSVNISRVVDVANPASPILELTVSAKAKPSEANAVRQCVLDHASALLAAA

SEQ ID NO: 14714 - protein, 202 aa, BradyrhizobiumColbertium
MGGSDPRALSRSLLDLCRMRKLTIATAESCTGGLVAAALTDIPGSSDVIDRGFVTYSNDAKRVMLGVEPSTLTNFGAVSKETATAMAIGALERADVDLAVAITGIAGPGGATPGKPVGLVHFAAAARDGRIIHREHRFGAIGRSAVRARSVVEALRMLMDLARGPQVAAKPQRAAASRLRPRVTRSPRRHAVKRRSPRSPRS

SEQ ID NO: 14715 - protein, 393 aa, BradyrhizobiumColbertium
MAKSQRTAVVLVAAGRGLRAGAGGPKQYRTIGGVPVIYRAMEAFSRHPDVSAVQPVVNPDDSAMFTAAVAGLMHEPPTMGGATRQASVLAGLEALARHEPDIVLIHDAARPFVSAGVISRAIEAASRTGAAIPVVPVTDTIKLTGENGEVEDTPDRARLRIAQTPQSFRFDVILEAHRRAAKDGRSDFTDDAAIAEWAGLTVATFEGDVANMKLTTPEDFVREEARLAAQLGDIRTGTGYDVHAFGEGDHVMICGVRVPHTKGFLAHSDGDVGLHALVDAILGALADGDIGSHFPPSDAKWKGASSDQFLKYAIERVAQRGGRVANLEVTLICERPKIGPLRDAMRARIAEISGVDISRIAVKATTSERLGFTGREEGIAATASATIRLPWSV

SEQ ID NO: 14716 - protein, 344 aa, BradyrhizobiumColbertium
MTGPAVFGSKPLKIGDIDVATPVFLAPMSGVTDSPVRRLAAELGAGLVVSEMTASDELASGHRMSRLRCEATGIGPHVVQLAGCERHWMAEGARIAESEGADIIDINMGCPARHVTGGQSGSALMRDLDHAVSLIDATIAAVKVPVTLKMRLGWDDRTRNAPELARRAEASGVKLVTVHGRTRCQFYKGEADWDAIRAVREAISIPLVVNGDITTYEKALAALEASGADAVMIGRGAQGQPWLPGQIGRRLNGGPEEAMPSLEAQLQYVRTLYDGVCALYGLRIGLRHARKHLGWALDVAAQASRAPAEKLKSWRQKILVSEDPRLVHQSLQDAFDDFAWRAAA

SEQ ID NO: 14717 - protein, 389 aa, BradyrhizobiumColbertium
MSLAAEHRRPSDSDAILDALPNPVLMIGPDGKIVAANIATEAFFEISTQFLKRQSLKELVPFGSPLLALIDQVRSSNSPVNEYKVDLGTPRMGGDRQVDLHVAPLTERPGHIVVMLQERTIADKMDRQLTHRSAARSVIALAAMLAHEIKNPLSGIRGAAQLLEQQASSEDRMLTRLICDEADRIVTLVDRMEVFGDERPVVRGPVNIHSVLDHVKRLAQSGFARNIRFVEDYDPSLPPVLANQDQLIQVFLNLVKNAAEALIDVPDAEIQLTTAFRPGVRLSVPGQKSRVSLPLEFCVKDNGPGVPDDLLPNLFDPFVTTKQTGSGLGLALVAKIVGDHGGIIECESQPRKTTFRVLMPMYSTSVKHADQSSRADSAGTSSPASQGAK

SEQ ID NO: 14718 - protein, 480 aa, BradyrhizobiumColbertium
MPAGSILVADDDTAIRTVLNQALSRAGYEVRLTGNAATLWRWVSQGEGDLVITDVVMPDENAFDLLPRIKKMRPNLPVIVMSAQNTFMTAIRASERGAYEYLPKPFDLKELIAIVGRALAEPKERTSTPDEDAEMEAIPLVGRSPAMQEIYRVLARLMQTDLTVMITGESGTGKELVARALHDYGKRRNGPFVAVNMAAIPRDLIESELFGHERGAFTGANTRASGRFEQAEGGTLFLDEIGDMPMEAQTRLLRVLQQGEYTTVGGRTPIKTDVRIVAASNKDLRVLIQQGLFREDLFFRLNVVPLRLPPLRERIEDLPDLVRHFFALAEKDGLPPKKLDTLALERMKQHRWPGNVRELENLARRLAALYPQDVITASVIDGELAPPSVSPGAAVQQGVDNLGGAVEAYLSSHFQGFPNGVPPPGLYHRILKEIEVPLLTAALAATRGNQIRAADLLGLNRNTLRKKIRDLDIQVYRSGG

SEQ ID NO: 14719 - protein, 779 aa, BradyrhizobiumColbertium
MRRWLAPVAVALALLSAFLTFLVLTGLTRIEPTPEVVRTFYLINAATILLLVGIIIRELWQLILARRRGRAAARLHVQIVSLFSIVAVLPAVLVAIVANVTISRGLDRLFSGPTKEVIQNSLTIARAYMQDHAQLIRGDILGMANDIAHARPLYDQDRRSFREMLTASASSRNLPGAMIIDKNTNILESADTGMRLAYSPPAPDFLSNVNESEPEIAVLPDASFVAAVIRLRAFNDTFLYVARPLDPNVVNQLKQTEVSVAEYAQIESRRLGIQVAFALMFAVIALTILMASVLIGLNFANSLVSPIRRLMNAAQTVSTGDLHVQVSVHQSEGDLAQLGETFNKMTQELRSQRDELVNASDLIDSRRRFIEAVLSSASAGIIGVDASGSVGILNRSAEKLIGHSEAETLGHPLSDVLPELDDMMKTAREGTQRLVQGQITINRDGQERNLSVRVSAEKNQPHDSYIITLDDITELVSAQRTSAWGDVARRIAHEIKNPLTPIQLSAERIRRKFGKTITEDKDKQIFDQCTDTIVRQVDDIRRMVDEFSRFARMPKPVMEGEDVADTVRQAVFLMKVAHPEIDIEAEFKQDPLRAQFDRRLISQAVTNIVKNATEAIEQVPAEELGKGRIDVVVSREGDDVLIDVIDNGIGLPKVARSRLLEPYVTTRAKGTGLGLAIVGRVLEDHGGRIELKDASDFREGQRGAWMRMRFAVSGQPAKSGGSEPAAPAGQATKPEGKETAAEFIKESNRDLETKEPAAGTKEPAEKTNDSTKIEASTGS

SEQ ID NO: 14720 - protein, 456 aa, BradyrhizobiumColbertium
MASEILIVDDEADIRDLVAGILEDEGFVTRTARDSDTALAEIANRRPHLVFLDIWLQGSKLDGLQLLEQVKKDNADLPVVMISGHGNIETAVAAIKRGAYDFIEKPFKADRLILVATRALENSRLKREVKELKQLAPSASQLVGRSPSMNQLRQTIERAAKANSRILIVGPAGAGKELTARTLHAASGRADGPFVVINAAAITPERMEHELFGIEQSNGEQPRKPGALEEAHGGTLFIDEIADMPRETQNKILRVLVEQSFQRVGGTAKVQVDVRIISSTARNLEEEISAGRFREDLYHRLSVVPIRVPALSERREDIPELIDYFMEQISAGSGLPKRQIGQDAMAVLQSHVWPGNVRQLRNNVERVMILAAGGPEVIITADMLPQDVGSMVPAMPTSNNGEHIMGLPLREAREVFERDYLIAQISRFSGNISRTAEFVGMERSALHRKLKALGVG

SEQ ID NO: 14721 - protein, 82 aa, BradyrhizobiumColbertium
MAADRAQNLQDTFLNHVRKTKTPLTIFLVNGVKLQGIVTWFDNFCLLLRRDGHSQLVYKHAISTIMPGAPIQLFEGGEDQPA

SEQ ID NO: 14722 - protein, 400 aa, BradyrhizobiumColbertium
MLDRGEQRVDALARHGRNQHRRMILRPARGDIEQFFALLRGETVDLVPDLDDAAGIVGVDAELAQHGIDVALLGFGIFMRDVAHMQDDVGFEHLFQCGTESGDELGRQVGDEAHSIRQHRLAAMRQVERTQGRIERREQHVGGLNVGAGQTVEQRRLAGIGVANQRDHAIRHALAAGAMQTPRRLHLLQFALELGDALLDQAAVRFDLRLAGAAHEAEPAALAFEMGPRAHQARALIVEVRKLHLERAFSGLGAAAEDFQNEPGTVEHLGLPFLLEVALLDRRQCAIHHHELDLQRLDQPGDFLDLALADIGRGPDLADRRYDGICNDKIDRAGEARSLVKPRLHIAHRMAFRLRVGTTPTHSQVGADDKHPSRMSPCRPRPVGIPAEIPGFQSDHSQAG

SEQ ID NO: 14723 - protein, 283 aa, BradyrhizobiumColbertium
MTPSRDISRLIEIMAALRTPVTGCPWDLEQDFATIAPYTIEEAYEVVDAITRGDLDDLREELGDLLLQVVFHAQMASEQNAFAFGDVVEAITRKMIRRHPHVFADKDGNLAPSHVKEVWDRIKAEEKAERAARRPPEDAAGHKSLLSGVKAGQPALTRAMELQRKASTVGFDWNDPRAVLQKIREEANEIEAALDRNDKQELAEETGDLMFALVNLARHVDADPEAALRATNAKFERRFAYIERALEAQGRTLEQASLEEMDALWNAAKGEETASEERNRARR

SEQ ID NO: 14724 - protein, 237 aa, BradyrhizobiumColbertium
MSDAFSSETALVLFSGGQDSTTCLAWALSRFAGVETLGFEYGQRHAIELACRDRLFDGIKGLRADWAAKLGESHTLSIPTLAAVSDTALTRDVAIAMGADGLPNTFVPGRNLVFLTFAAALAYRRGITHIVGGMCETDYSGYPDCRDETIRAMQVALSLGMARNFELHTPLMWIDKAATWQLAQDLGGDGLVDLIREHSHTCYLGERGAQHDWGYGCGECPACSLRAKGWREFVAGR

SEQ ID NO: 14725 - protein, 762 aa, BradyrhizobiumColbertium
MTAASSVIAEAQTASGSSQQSVLPAVTVEAGKPATPRRTRRQSTARATRQTQSPAVQPAQGRQATAAAPEGTNSDSLKPMGGRLPQPGIPHPPTQSISVVDRAQIEATSPTGLLDVLASVPGISIARSGGIGGQIYLRGFSSNNFRSPLFIDGDRFRGRNTLQLNYLAPDEVERVEVIRGPGSVVYGSEALTGLVNVVTRSYSGDTSGPFRFTGGGWSAGYGSVANSFSTYDWVKGAGQGFDFIGGFAGRWGSDYQTALGTVPNSDYQSVGGNIKLGYTPDIGQRLELSLRSYSEVDGRAGGVGGAPGAPYLQVRQDPNQVHSARIAYTGELDGLVKHVETSFYVNYFDTKLSTINNTINAAGIATKTVRSTSHVIGPLVIGGRSLAEIPWLGPWGATKKTLGLDGFREARPGSESTSETITRNGTTGVVTSDVISPYTKQGPDTTQSNVGAFVLHEWKPIQPLTLSAGGRFDWFNTTTDTSPLASTIPANVRAVYASKTNVDQTAPTGSLGFVYAVLPNVDLLGNVATSFRQPTNSELFAVTATQLPNPNLKPESGVTYEGGARFHTTNAELKVTAFDTHYENFLQTVAVTLNGVGGYTQSQNVGKAEVTGVEVEARWQVTPAVNLFTNFAQLRGTNTVTDKPLPFLAPYRGRVGIQYADPSGAYSILGVIDWAASKTRIDPAQEYTTSGYAIPKLYATLQLGKLVSPQLGDTKLILGVENIFNTAYVDASTFVNRSYPRSFTNPLVETGRNISVKVQHTF

SEQ ID NO: 14726 - protein, 347 aa, BradyrhizobiumColbertium
MIALGAFSSAHAIDLTDQRNRSISFSRLPERLVIIPIPAPSTFMAIDGSERKIVGMNEYAARAMQEGISGKLFPGFKQIQTGVTTGGDASNFAPNVEAILALRPDAIFQWANSNEVIGPLDRTGIPVVGMRVGSFENYVAYVRLMGKIAGREERAAELLGKQEEIRQSLASRFADLSSTQRPRVLYFNRATNMLRVSGQGTAQDLAIQLAGGQNAIGSTPSISTVTIEQILAWNPQVILLGNFDSAMPSDLYSDPRWQGVDAVRARRVYRVPLGGYRWDPPSHESALGWLWLAGLLHPERGQVDIRRSVRDWFGFLYAYDPTDEELDRILFLQENAGSAGYEAYRAH

SEQ ID NO: 14727 - protein, 318 aa, BradyrhizobiumColbertium
MLWSVASGRYQVPFDTVLSIILSHLVAVKVTWTTTESVVVETVRLPRVLTAAIAGAGLSLCGAVLQAIFRNPLVGPQTIGASSGAALGGVTVIYLVGFGPLVQVGAFGGAALALLAVLAFHRSDNLSPILTLVLAGVVVSAFCSALVGLVTYLADPETTLQVIVFWLLGSFASSTWPQFGLIAFCTTLAAIVLIGMRWRVNVLSLGDDEARTLGVNPARDRLILLAAACLAISSQVAVSGTIGWVGLIIPNLARMMVGADNRRLLPVSTVLGAIFLVVADTLARSLTPAEIPVGIITALVGTPIFALLLRRTTKSGAA

SEQ ID NO: 14728 - protein, 258 aa, BradyrhizobiumColbertium
MIQIENAGHSYGSGQWLFRGLSATFPAGKIAAILGPNGCGKTTLLRAISGTLRLKEGIVAIDGHVGFVPQALTADQSYSAADMVLLGRSRYLGRFNSPNRKDRERAYACLEEVGLTALAQQRYDRLSGGQRQLVLLARALASDCKVLVLDEPASALDIANQGVVLRLLLRLASSLGLTVLFTTHHPDHAIGIAHTTLLMQRDATHIAGRTEVVLTEGNLARMYGVPVRRVDVHADEETASAIVPLHGLRGRVPDLAAR

SEQ ID NO: 14729 - protein, 216 aa, BradyrhizobiumColbertium
MSLAILDGGTFYHHAAIHGQRYRELFDKTIYAPELTADALVGVTFLIVPDRVNPNILRTKRDVLIDFAKAGHTLAVFGENRADTWLPGVTWAPRPTNFWWWLDKDARPPNRLLASEHEFFQAVPFEHTIWHFHGVLTPPAGARALIDVPADPQGRDSGGALLYEDRVTLPGSMLVSTLDPFYHHGSNFMPAATKLLDGFLPWARAKAALRAYSSDV

SEQ ID NO: 14730 - protein, 200 aa, BradyrhizobiumColbertium
MKPGLALSFGYEDGSLHALTSAGTAPEILLRDIYSLPGIDLNDFSVLFVSMHSDQRFLAARALQIEQFLVRGGVVVANGHHAYSYLPRMAGFHTIHHYRLSDITVLRLTDHPIWHGIDPRDLTFRRGVSGFYGRVWHEAPPDAQIIHALGKPDMPLDFIYPVGRGHVLFHGGNDLWTFGGEDKQLASRIMQWVAGERDVQ

SEQ ID NO: 14731 - protein, 163 aa, BradyrhizobiumColbertium
MAEEEPIEIGFPMVAAYHGQSALAMAAIVFQAQRAAFALLSPQAVPARRDISIVSGHPGPGVRDAFEVITRAVTRGAYVVDRSLPDARFVAGHAISYSFRITLGERTVEMALRPGVLPGRFFELVFTRDRTTEQERELSALKRAVAQDVLAKEPDTLFTMRVS

SEQ ID NO: 14732 - protein, 127 aa, BradyrhizobiumColbertium
MNSSTQAAAAATAAIPSIPRDDEGPVFRAPWEAHAFAMALTLHERGVFTWPEWAAALADEIKRAQAAGDPDTGETYYLHWLATLEGLVARKGVASTETLHRYRDAWDHAADRTPHGKPIELQPEDFR

SEQ ID NO: 14733 - protein, 219 aa, BradyrhizobiumColbertium
MNGVHDMGGMDGFGKVEPEANEPMFHEQWESRVLAMVRAMGAAGAFNIDTSRFYRETLPPHVYLSSSYYKKWFLGLEEMLIDKGYLTREEVAAGHAMQPGKALKHGRFDLANVERVMVRGKFDRPAPAPAKFSIGDRVRAKNIHPTTHTRLPRYVRGHVGVVELNHGCHVFPDTAAMERGENPQWLYTVVFEGRDLWGPDGDPTTKVSIDAFEPYLDPA

SEQ ID NO: 14734 - protein, 209 aa, BradyrhizobiumColbertium
MSHEHEHHHDHDHSELSETELRVRALETILTEKGYVEPAALDAIIQAYETKIGPHNGARVVAKAWTDPTFKKALLDDGSKAIGTLGHVSRVGDHLVVVENTPGRHNMVVCTLCSCYPWEMLGLPPVWYKAAPYRSRAVKDPRGVLADFGVALPKDTEIRVWDSTAETRFLVLPMRPEGTEGWSEEQLAGLVTRDSMIGTGLPRKPGAPS

SEQ ID NO: 14735 - protein, 272 aa, BradyrhizobiumColbertium
METMVTDYVKIEKGLGPEGRIAVVRFDRGDGINALSPEALRQLTAAARSFEDDAATSVVVLTGSTSTFSAGFDLKDAEGRSRKDMDLGTLRRHLKLGPRLTQAWQEMEQITIAAIEGFCVGGGVALAVALDFRIMGRDAHLRVPEIGLGMNMSWQSIPRMLHLIGPARTKQAVILADQRISADEAHEWGLVEQVTEPGHAFDAAMELARKVAAQPPLSVAMTKLTVNRLAHALDDLASHMDIDQFALASLSEDHKEGVEAFLARRKPRFRGR

SEQ ID NO: 14736 - protein, 329 aa, BradyrhizobiumColbertium
MPLSAILPIQDSGASLLQASSSDVDEHCASLGGWRLSYDQISAGAFRGSFTQLSLPRLDVFREITSQQVRQHGLLGDGCFGIALPWQGDGEINCNGASVAGAQVIACIDAEIDICTPKSFELRGVVASAALIEELAARLDIELPRVVWHQLRVIEMAQAPVARLRAHLAAIHDTITTTPERFDQPAVRAGLEDALLVEIMDMLPTARANDSGRSAAARKRTVERARALMHGSGERTLSLLEVCKAVGASPRKLGYCFQEVLGTSPMHYWRAMRLNRVRRDLKRAAGTGASVYDVAVRHGFWHFSQFSLDYKRHFSELPSETLRRTRLAP

SEQ ID NO: 14737 - protein, 398 aa, BradyrhizobiumColbertium
MRPTEIMRGSPPAPEAQVTRANWRSFPAIRWGFTHTREVLPTAEVRRSAHPTPMRSAPRELSKLGFTTPDGQPTTVEATLHETFGDALLVMHRGTLVHEWYGDGMSATTPHLICSISKSIAGTLGGILAARGLLDPEARVVRYVPELEASVYGSCTVRNVLDMAVAIKFEEDYEDPAGDVARYRFSSGWDVPPQGVEPSHQRAYLTTLRGTGKPHGKVFHYVSTNTEVLGWVYERACGAPYPRILSEYLWQPMGAEEDGSLTLDSHGMGRIAGGLSVTARDLIRFGEMIRCRGVVEGRQVVPGWWIDDIHENGDPDAWADGDLADIFPGARYRSKWYTIDPSRNDLAGIGIHGQWLYIDAAADTVIVKLATQPKAMDVPLDHRWLAAFRAITAHLALR

SEQ ID NO: 14738 - protein, 664 aa, BradyrhizobiumColbertium
MLDPTEANSRLQAARPHPLDPLTAEEITAACTWVRAAATAPENCRFPIVRLEEPTKQQLAAGRGGRRAFVLTLDAMTGEAIEHIVDLGRGEIVTRKMLPNREAPYGQPPVMLEEFFKCEAAVKADPGWRAAMHRRGLTDKDIELVQVDPFSSGFFDKEFERGTRIVRAVSYFREHPQDNGYAHPIEGVVAVVDLIGGKVIDLTDEDPIVPIPRKKRNYGAHEVTDPRTDIKPLHIEQPEGPSFRVDGWKVDWQKWSFRVGFTPREGLVLHQLAYQDGTRKRSLIHRASVTEMVVPYADPTANHFWKSAFDAGEYGLGMLANALELGCDCLGNIHYFDVPAADNKGEPFVMQNAICMHEEDYGIAWKHYEFRNGLFEVRRSRRLVISFFATVGNYDYGFYWYLYQDGTIQLETKLTGIIQTAAVPSGEKYRWGGMIDDNLGGPTHQHFFNVRLHMDLDGGGNTVTEHDFVPRPWGDDNPHGNVFDTTTRVLSRESDAAAVANGETGRFWKISNPNATNSVGNAPAYKLVVNPSPLMLAQEGSYVRKRGGFATKHVWVTAFDPAEKYASGDYPNVHAGGDGLPRYAAQDRNIENADIVVWHSFGHTHVCKPEDFPIMPVEYAGFVLKPTGFFAANAAGDIPPDRNSRSVLASGSNRDESCCCAGKT

SEQ ID NO: 14739 - protein, 745 aa, BradyrhizobiumColbertium
MLFLGAVSTFSLVVPIGSVEAQTQIPAVTVEAPAQRARPAAIASSRRAAATRTARAARRAPAQQPAPTQSASSNGATGERANGPVRGFVATRSGTATKTDTPLIETPQSVSVITTDQIRNQGAVSIGEALRYTAGVSGDVNGGSDTRFGGLQIRGFDMTMPGLYIDGLRIPSSNYVHFNGLDPYGAERIEVLKGPSSAMYGGSGTGGILNYVTKLPTAQQFGEVSISGGSFNRYQGQFDMGGPANKEGTVLWRLTGVVRDGQTQVDFSKDNRVFIAPAVTFKPNEDTTLTLLANYQRDRAGWGLQFLPASGTVWPNNGRTIPVSFFAGVPGFDAFNTEIATAGYQLSHNFTDNITFRQNLRYAYQHNEEKVFYGGGYTNEAAGQLARYGSYSNSYINSFAVDNQLQGKFTTGMLSHTTLVGVDYRNTSFRDTAFGVTTSSPEINVFNPNYSYDYVIGTMSDNTGVKQSQVGVYAQDQIKLGRLSFQLGGRQDFVTTQVDNGLANTTASKDASAFTGRAAVMYNFDNGIAPYFSYSESFLPVLATASGQLLSPETGVQYEVGVKYQPLGWNALFTFAAFDLTRDNVVTYPPPTFVAEQTGQVKSRGVELEGTMSLADGWNLRAAYAYVDAVVTQDPVNVGKAPVTVPLNRASLWSDYTLQTGPLAGLQFGGGIRHVGATWGDDSNTFKVGASTVLDALLAYTRDNWRLSLNVTNLADTRYVAACYSLSGCFYAEGRKAIGRLTYRW

SEQ ID NO: 14740 - protein, 429 aa, BradyrhizobiumColbertium
MRAMFGKLHRWAGLLTAGFLFFSGITGAIISWDHELDDVLNSHLFDVSTKGPAIPSIELAKMIEQRDHRARVVHLFMMPEEGHSLWFFVMPRIDPATGKRYALDYNQVFLDPNTGAELGRRYWGAVWPVTRENFVSFLYKLHYTMHIPEFWGSDRWGMRVLGIIAIIWTIDCFVGFYLTLPSRRRAKAARAPEVARQLERGFWARWAPAWTIKTSGSAYRINFDIHRAFSLWTWGLLFIVAFTAFSLNLYFEVFSPLMKMVSNYTPTPYEQRPYRDLDDPIEPKVTFADIAARAAADGKARGWTTPVGSINYGPAHGVYAAAFFHPGDDHGAGGVGPAQLYYDSEDGRPIGERLPWVGTAADIFVQAQFPLHSGRIVGLFGRILISVMGLVVAALSVTGVVIWWRKRRARVRVRETTAMRLSRQLTPAE

SEQ ID NO: 14741 - protein, 266 aa, BradyrhizobiumColbertium
MVCLLVLAAPGHAAAPEQHYLELRDRYIAKFSKAKESDETSKQHDTALKELAGVLRGLVGPVAIKGLPAEGKSNVDTLFRDDVGFGHLDGLSFASEDYRTQAVVTTMTLLGHWLREHREDGMPQEIAAALRSDRFYHYAIQDAAFAKYAELPVTKPASASAAVAVLGLRGNGDLKGLPSEIGMVAIQGDKVYFIATSDAVKTAEIPACEKVWKQMMARKTPQDAMAREDQAMDAYTKCFAKEAPSQSWFAAAVKKAQAQLDSLLAR

SEQ ID NO: 14742 - protein, 483 aa, BradyrhizobiumColbertium
MNAIDLLIGGKDQSASNQRTFQRRNPISGEIATIVAAASIDDAMRAADAAAAAFPAWSQLAPSERRKRLSAAADILARRAAEFTALMVAETGATDGWAGFNVHLAEGMLREAAAMTTQISGEIIPTDKPDNLAMAFRQPVGVVLGIAPWNAPVILGVRSVAMPLACGNTVVLKASEMSPGVHRLIGSCLTEAGLGDGVVNVVTNAPEDAQAVVEALIAHPAIRRVNFTGSTRVGRLIALACAKHLKRALLELGGKAPLVILDDADLEAAVNAAAFGAFMNQGQICMSTERIVVDDKVADAFVSKFVAKANSLPHGDPGKGNVVLGSLISNAACDRVRGLIDDAVAKGAVVAAGGHGSGTILPATIVDHVTPAMRIYGEESFGPVVTVVRVSGVDEAVRVANDTEYGLSSAVFGRDIARALGVAKRIEAGICHVNAPTVHDEPQMPFGGTKASGYGRFGGKAAIDEFTELRWITVQTGPRHYPF

SEQ ID NO: 14743 - protein, 243 aa, BradyrhizobiumColbertium
MLEVAALSHFYGKHQALADVALGIEQGEIVAILGANGAGKSTLLKSIAGLVRPAAGARIRFEGQSIAELPAHLIVERGIALVPEGRGVFGDLTVAENLQLGAYPARARAGEADRLAKILQLFPRLAERLPQAVRTMSGGEQQMVAIGRALMSNPLLLLLDEPSLGLSPLLSREVFRALTQIRGSGLSVLLVEQNARASLDIADRVYLIESGRNAGTGLASAMKNDPEIQRAYLGKARGASTPT

SEQ ID NO: 14744 - protein, 556 aa, BradyrhizobiumColbertium
MTGPKRALLWCAGLALAAATVTYPLYANGYYLALGISVLYFTILATAWAMFSGPTRYISLATVAFFGLGAYTAAVLGETMPWPVVLLAAAGVGAFTAAITGLSTLRLSGIYFVIFSFGLAELIRQLVIWYEVNIHKSVGRYLFSAVTQDILYWQLLGLTAIVFLVGWLLGRSRYGLALRAIGADETAASHSGIDATRVKLGVFILSATFMAVTGAVMAPRWTYIDPAIAFNPTISFQVVIMALLGGAGSLFGPVLGVIPLVLLFEVLSATLPNHFSIVLGLIFVLIVMVLPNGVIGLFGTGRWRVPTGGPVAARAGTSDAPLLAVEGVSKSFSGLRAVDDVSFKVAPGEIVGIIGPNGSGKTTLLNTLSGALKPSSGTIRFGGIVLNGLRAHQIARLGLARTFQLVRVMPDLTVAENVAAAQLFSTSNGSSATASELLDLVGLGTVHAAPAGDLTYIDQKRLELARALALQPRLVLLDEWLAGLNPSELETGIALIAKLRDRGFTIIMVEHVMDAIRALCGHCIVMNAGCVIARGGPDEVLSDPKVVAAYLGDDDA

SEQ ID NO: 14745 - protein, 291 aa, BradyrhizobiumColbertium
MLLVDIVLPGLVLGGMYALIALGLTLQYGVARIMNLSYGESLVAAAFGAFSLYSGLGLSPLAALLLAVPVAMVVNWLLYRFLLERLMRRSKDRGAQEIDSILVTFGVLFVIQGAMLVAFGGQYYSYSYLSIPLTIMGSTLAVNRLVALLFAALVGGAVYLALTRTRIGTAVRAIAVDANAARLVGIDVAALSGLAFAFGGGLVAVGGVLVSMFLTFNAAMGVIFTMKALVVVIMGGVGNVMGALVAGLLLGVVETAVARLVDPGLTLAATYALFLGVLLIRPTGLFGRAAS

SEQ ID NO: 14746 - protein, 404 aa, BradyrhizobiumColbertium
MFSANRRTLLRATGLVAAVLGALASTAEAQEKIRIGYAISKTGPYAGGAGITTLPNYELWVKDVNAAGGIKLGDKKLPIEVVEYDDRSSSEEAVKAIERLANQDKVDFILSPWGTGLNLAVGPTLNRLGYPHLAVTSVTDKAPELAKRWSNATFWLGTSAQISQALADLLGKLRSEGKIGANIAMVSIADQFGIELSAAGREAFKKHGFTLAYDKTYPMGTQDLQPLVKDAIASNPDAFVAFSYPPDTIALTEQAQLLKFNPKIFYVGVGTAFPLYKGKFAANSEGVMGIGGWNADSPRLKDYLARHKAATGKEPDRWASSITYASLQVLQQAIEKVGKLDRAAVAAEIRSGTFDTIIGKVKLKDGLLQEVWSVGQWQNGEFYALAPASLSGARTPVVPKAQWQ

SEQ ID NO: 14747 - protein, 306 aa, BradyrhizobiumColbertium
MRRGVAGTVSAAASGAAPVGAELIRSHYVARRWMLSSKAARPFIHLLCLHEGASIDVGEPGRTMAFTGPAIVWLPAGSAEYLEVSAGATAELLQLRAGIWHRYLPPSAEPAYLALEAAGGIMALPVEPDLVTTMSRSIAAIAAEIASPARSAAASIMSAELTLCVLRLWRLFADSDRNEEGSSAEILSRFRRLLEERYQQHLRVSDYAKLLGMTPDRLHALCSRELKRSPSELIQQRVVKEAATRLEAGTVAVKQIAFALGFKDTAYFSRFFRKHTGEAPGVWRRRVAARSRAGQSRPTLNFADWP

SEQ ID NO: 14748 - protein, 334 aa, BradyrhizobiumColbertium
MTQALTRRRFIRISAAAAGLGPLSISGRLRADIAPVTWRGTMLGAVATMEIHDEDRRRAERLITLACAEARRLERLFSLYLDDSALVELNRKGILIDPAAEMVDLLSASQHYSTLTGGLFDVTVQPLWDLYAGHFSRDEADPAGPAAKEIQAALARIGSSRLSISRDRITMPRGMAVTLNGIAQGYVTDKVVDLLRAHGISHSLVDMGEARAIGARPDGQPWEVGIADPDHVGHAEAVLPIVDRAVSTSGAYGLQFGAKAQFNHLFDPRTGSCATGYRSVTAVSRSATAADALSTAFSLMQEEEIRSLLPRAGIDRVDLINDAGHTTLTASRQS

SEQ ID NO: 14749 - protein, 189 aa, BradyrhizobiumColbertium
MRRVAIAWALLLPFALAACNEKQTAKIPPPHRMTAEDIGHYCGMNVLEHPGPKGHIFAASLIQPVWFSSARDTLAFTMLPDEPKDIQAIYVSDMGKAANWDAPGSDNWVEARKALFVIESRVKSGMGGDEAVPFSDRAAAEKFAGENGGRIVGFDEVPRDYVLASANAGGGAGPGEAEGPPGDGSRRTP

SEQ ID NO: 14750 - protein, 275 aa, BradyrhizobiumColbertium
MNVLIIAAKEIHQAIRNRWVLAATLLLAGLALSLTFLGSAPTGNVGVRALDVVIVSLSSLTIFLVPLIALLISHDAVVGEMERGTMLLLLSYPVARWQVLLGKFLGHLAVLGFATCLGYGAAAGALAATGSDIDSDSLLAFAAMVGSSVLLGAAFVAIGYLVSALVRDRGTAAGICIGLWLLLVLIYDMALLGVLALDQGRSISATVLNALLLSNPTDAYRLINLTGFANVSTFAGMAGLAQSTSLTIPVLLAALLCWTLLPLGLAALAFSRREL

SEQ ID NO: 14751 - protein, 306 aa, BradyrhizobiumColbertium
MTGTVRVSEVTKTYGRLTAVRDASFTLGQGELVALIGHNGAGKTTLMKLMLGLIRPTSGSIEVLGDNPAAGEFAGRRQLGYLPENVSFDPALTGRETQAFYARLKREPVAKALELLDAVGLGAASRRRVNTYSKGMRQRLGLAQALLGHPRVLLLDEPTTGLDPELRQTFYDIIARLAAGGATVLLSSHALTELEERAGRVIIMNRGIKVADGSIDELRRLARLPTRIRLRVAGLAPSELPGWAPKDATCRRLNGHIVEIDAAPERKIELLHRATAAGNSVEDVDVVPPTLDELYAHFLRQSEQAP

SEQ ID NO: 14752 - protein, 452 aa, BradyrhizobiumColbertium
MRLLSRMFPAVLVAAGLSSFAEAETLTAAPGQPLQAVLDRARAGDVVKLAPGDYHGSIRIDRPLELVGTEGVVLDGDGSGNVITVSAPDVVVRGVTIRGSGRDLQAMDSGIFLQKTAERAKIEDNRLVGNLFGVYVHGARGSRVVRNEIEGLRGGRLSEAGNGVSLWNAPDVTIANNTFRYGRDGIFSISSSKDRFIDNRFEQVRFAVHYMYTNDSEVSGNVSIGNHVGYAIMYSNRLVIRGNSSDRDRDYGLLLNYANYARIENNRVTGGPLNPVMQKTEDAPDDERGMLPQPKRESSLRTGPEKCVFIYNTNHNKFRNNWFERCSIGVHFTAGSEGNEITGNSFVSNANQVKYVGTRHLDWSIGGRGNYWSDNPAFDLNGDGIADTAYRPNDMIDRVLWTAPAAKVLINSPAVQVIRWAQAQFPALLPGGVVDSHPLVSPPNSRTPKETR

SEQ ID NO: 14753 - protein, 649 aa, BradyrhizobiumColbertium
MSENEKTKGVSRRAVLGTTAAAAGVGLAGGVAMNAGSGFVSSADAQTKTAAPKAPAARPAVQKAEVAPGELDEYYVFFSSGQTGEMRIIGLPSMRELMRVPVFNRCSATGWGQTNESIKVLTEGMQPATREFLKNRGGTYLNGDLHHPHISFTDGTYDGRYAFMNDKANSRVARVRLDVMKCDKIIELPNQHTVHGLRVQKYPRTGYVFANGEDGVPLPNDGKILDDPKQYRSIFSAIDGDTMKVAWQVIVSGNLDNVDADYQGKYCFATCYNAEEGVTLAEMTAAEQDWVVIFNIKRIEEAVKKGDFKEMNGVPVVDGRKGSAYTRYVPVSNNPHGMNTAPDGIHVVAAGKLSPTVTVMDVRLFDQLFDDKIKPRDVVVAEPELGLGPLHTAYDGKGNAYTTLFLDSQVCKWNIDLAKRAFKGEKVNPILQKLDVHYQPGHNHTSMGQTKEADGKWLISLNKFSKDRFLNVGPLKPENDQLIDISGDQMKLVHDGPSFAEPHDATIVHRSKINPISIWDRADPMFADAVKQAKADGINLEADSKVIRDGNKVRVYMTSTAPAYGLDQFQVRQGDEVTVFITNIDAVEDLTHGFCIVNYGINMEIGPMATSSVTFTADKPGVYWYYCSWFCHAMHMEMKGRMFVEPKSV

SEQ ID NO: 14754 - protein, 765 aa, BradyrhizobiumColbertium
MSKRPVDDIALARRAALALAGLLLACLTYISPACAAGDLQTYLPKIAPGEFFASADRFGPPQGDPPIVPVYRGDQLQGFVFLNSDFANSVGYSGKPIHLLAGIDPKGVITGIKLVDHKEPIVLVGIPEARIVAAVNALIGKDMRPVASGAEKPPQVDIVSGATVTVLVMHDSIVRAASKLIRSGRVGAGDGAAASAALPPVVKTLDLEHSEVRDWESLVGDGSVRRLHLGIGDVNEAFAKSGSAAASQYPEPGEASETFIDLYVALVSAPTIGRSLLGDDGYQRLKGRLKPGQQAIVVAGNGLYSFKGSAYVRGGIFDRIEILQEGNSTRFRDRNHTRLGALEAAGAPEFREVALFVTPPEFTLDPTEPWQLQLLVQRSLGGRDKAFLTFDLSYALPDRYIRREQRAVTVPENAPPPASQPAAAASAAPPEADEPLWMRIWRSSTVSIAITAFMLAGLTGIFFFQNLLVRRPVLYNWVRRGYLAFVLVWLGWYANAQLSVVNVVTFTNALVTGFRWEFFLAAPLIFILWAATAGGLLFWGRGPFCGWLCPFGALQELTNTAAKWLKVPQITVPWGLHERLWPIKYIIFLGLFGLSLYSVDMAERFAEVEPFKTAIILKFSRSWPFVAYAVALLVIGLFIERFFCRYLCPLGAALAIPGRMRTFEWLRRWQECGSPCQRCAKECPVQSIHPEGHINVNECIYCMHCQELYYDDHRCPHMIQVRLKREKFAAMSSPSMRSGGKGPATVITAGGKPVGASAAISPPPH

SEQ ID NO: 14755 - protein, 275 aa, BradyrhizobiumColbertium
MKSLDELFALAHAMEQEAADKYDALAQDMRAQGKDDLADVFTRLASAEREHVDSVAQWSHSRRGKSPDPALVRWEPPEALDKEAAAEVKASRLMTPYRALAMAVRNEERAFAFWSYLAAYSHDPEVKKASEAMAREELGHVATLRQERRRAYHQQHERESADASAAPQLPIDARRLELRLVEQLGEIEQRLRGPAAVRARDIRQQATRLADEAAGFGSFPAAMERKDSLEIAEALADAYLDGAERASDAARLASLQRLAEQAISRLAWMRSLMED

SEQ ID NO: 14756 - protein, 295 aa, BradyrhizobiumColbertium
MFEATGHNSIDALLPREMAERAEQIGVDKTHLETGSLMALAVLAGAFIGFGSMFSVVVTAGAEGVLPYGVIRLLGGTVFSLGLILVIVGGAELFTGNNLMIMACASGRVAPGALLRAWTLVYIGNFVGAAGLALLVFLAAGYDHGSGAVGLTALAAANAKASLSATQAVIHGILANVLVCLATWLCYGARSTTDKILAIVFPIAAFAANGFEHSIANMYLLTVALLPKSGADGTFWDLIGKTPSHFPHLTVRGAVFNLAWVTVGNMVGGVLVGITYWFIFLRRSRSKAATGGPAP

SEQ ID NO: 14757 - protein, 397 aa, BradyrhizobiumColbertium
MIPIAISRLETDDEIEIVERKGIGHPDTICDALAEMLSRNLCREYQKQFGRVLHHNVDKALLCGGQAVPAFGGGTVTVPIRIFLAGRAIAEFGSVTVPIDTIAVEGSKSWLKANLHALDVDRHVRIEALVRPGSHDLRSIYSRRRIEDIPLANDTSFGVGHAPLSPLERLVRAIEQRLNGRDRGSDHPAWGEDIKIMAVRNGSHLDLTIACAMIGGFLAGIDDYLEEKSALAARVRDCASQYGFPECHIAINAADDPASGSVYLTVTGTSAEAGDDGQVGRGNRVNGLITPCRPMSLEAAAGKNPVSHVGKIYNVLATQLAETLVSAIADIDHAHCLLVSKIGAPISEPALVHLRLATRNGASLAQLRNPVEALVSDGLSRTPELVARLAAGTVDVF

SEQ ID NO: 14758 - protein, 156 aa, BradyrhizobiumColbertium
MTRTFVQDIVAVAPDQRVCLIATVQLVVSGAANDMIAPRGPYEMLVANSTDEIVVHRSAGQAVVSGAAERYAHLVIGAREPVRVPVTNEEKIVVEGLGDGFVDGVMMMPILETPAHVIAPVGGHTASARPAWTRSRQPSEPKRATDVPHSIGASAE

SEQ ID NO: 14759 - protein, 344 aa, BradyrhizobiumColbertium
MISPDSGHDIITDFRTGPGMFDHLAVMDIEPEQFRFNDTRDGVRISWHTSKGDGSVLLEGVFKADLAQDDFMFADDRHLIDPTSSHSDRVAAEHFVKDEGNEDAPPSAGETPAQFQRSFDGNLVKYGSDGQNDVFHATSKNDHYFGLGGDDHLSGGRGDDHLAGDAGNDVLDGGNGRDDLRGGDGDDSLYGGAMADNLMGGAGTDHLNAGAGHDMLEGGPGDDIYNGGDGADAFMVSHGSGNDTVVAGFDPGPGAFDHVAFMDIMPNEVSVIDSLSPHGDGHTGVLVSWGDGSIFLEGIQKSQMAQDDFMFNAVEGGAFVPDPSISTEGSQMIFQGTHGDWHLA

SEQ ID NO: 14760 - protein, 351 aa, BradyrhizobiumColbertium
MIPNTPWLKTVSQFDDEAIASVAVRLAPMGRIDADKLLRLHLDMPWESVSAIAGKPEAVAELAALGSFDLQRLSIGAYKIFKDRIEFLGRELPVGWFLPERRRVAPARLAADGNDARIRNRWLVSAFPCDVESGEVLLDRCPSCINLLGWRNMTNVWSCQICDFDMRTARPKACPHEIVAAAKELADYIFDYDLRLPGPLGDLSSVDILKLSGWMAYFRAIPQELFLGITVKNAAAGFSQLKRWPCSFDEIVLDLLGASTAADLAVGDTISRHKAAAGIMASIDRLPSLKAREILKSRLMELLHLGHGFAEAFLNVTEPVLPLGLAISGLDRRRSSKAARAKTDRGLIPSD

SEQ ID NO: 14761 - protein, 331 aa, BradyrhizobiumColbertium
MSDLENILNSPLVLSKLDDIRGIFVRHTKAEEAREMVLLSLAFAKRLRENSSTYLIGWSRCGKSEIVKRMLTERTGKPVSKEKIQLLQGNGKRYLYVDLMGGSTPRILARKINFKIFNDRLSLRLGEEEGTDALIANLNDNEVDAVFLDEAQNLAEDGVKKLARFILAFENSCNAPLFVVGPPVLTKMMVKADAMGQRSGGMKILSPFGFANDAQREEHAAFVAAFSDELPFESNWFKDNEDDHHMLRATFFAQRGRPGRHSLLVEAAVPHAFMRTGGVEPKELTKEDIAAGFDRVFLSQEIMQGRNPFRGEDYSRLPSFPLSVEQEATTE

SEQ ID NO: 14762 - protein, 785 aa, BradyrhizobiumColbertium
MLKILDASEAAALSTPVDEEPRPTIDYLLFDNLTPNQTVLIDSKPHQFFKKMEGEGPHLLINHHTGETARLTTTRLIELFQEGRYYNPLRKPPLVDEKKSIDETRALIGKVYHTLNAKPRGRAAGIWRYVGAFINEMLIAPPGKPFYQNHANAETIIERVDGTIDLENLKRPQGKQIKKPKKTTRTVLRWVAAELVHGMQEATFVHKNAIKSREQKLPKEVFSIISATIRYLVEISAEFGPTKIQMVANQRIDGRNAEIRIRNEEIKKLIENGELSERRLLDELPTVGLTTVQVQYRRFDAWIRLAKEQGVQAADLQFGGQGSFERPKRILDVVEYDHHQFDFAGVLGETPFGRVWSKAGIDRFWICLGLDTYSGYPVGFFPSFEPGGLYPALAAIDHGIKVKTYVDKRFPHIRGSLLSYGKPRKVRYDNGKEFVSEQMALALARVRIGFEMAVPHQPDTKPYVERFFGTLESDFVSWLKGSTGSSPQKRGARKPLLDACITIDDFIMLFHLWLIEVYARRKQEGMDWDTPEERWLRGASSDSNRPQPLTVDEAKKWDLIPSLELKLTAGKDGILWNNLVYQSPQIQAMRARSGSMGKRKRTNTPVTVRIPLANVGRCVVIDHTSRFPGNEHLPEEFVVMSTDEEAHGLTKFQWEALSKLRLAKKHAPTEHPSHKVGFNHLLEEALKAMGAVPTGERPPAKAVLSNGYYPRIAGVLGRGAEEHALAVTDELIERTGIFRPATATEEVVPPPPVQAARAEETSVKDTSAPRKKLRFGVDAPIIRSQ

SEQ ID NO: 14763 - protein, 254 aa, BradyrhizobiumColbertium
MPKKIERVWTALCDGVEVFRLEANEATRRVITGRRNHVVGGHYSMKMNGHIVHEGGIEERFVRVCDYVLGVKRIWAQPETIRMNIFPEFANEIYTPDFLVEHDAGFVRYEIKEWRELRPPRPTVGDEKAQKRWDDAVLLRARLRRIREAYRRAGLPFRVITERGIGLRWGDRDVVDEIAANDRWDIEPEELDRLVTALNDAGGSLPLSRCQALFEEAPHPRGVVLSRIPERIVYIDLFAPIGPETIVHKGAISC

SEQ ID NO: 14764 - protein, 68 aa, BradyrhizobiumColbertium
MRSVHNHLSPIVERIFGAIDHAFGIPTRVYRDNSREFCSLSTLDSFVQEQVDLVCADLRKRPDEDTDA

SEQ ID NO: 14765 - protein, 273 aa, BradyrhizobiumColbertium
MDGLRDADASASTMDCYSRDIRDLAAALGSDEVAAIVRIDQSAVDGIAATWAATGTAQSTIFRRFSALRSFARFLSLKRSYDCSKLLSCRFPPCGRVRRAAVGDDVIEIMLAAPTGDCDESWTHARDHAALRLAASSGLTTAELVALNRGDYNPRLSTVRVTGSHLNGRPGIVSPDAKEWLERYLRVQPFELPSSAPLFVTARGTRFSARSLQLACRRLRQATGVGPDAVPTSLRNALAANLVRSGAAPEVVAKTLGIGVAAAWRYFDAPEML

SEQ ID NO: 14766 - protein, 88 aa, BradyrhizobiumColbertium
MIRVHIELLPGGSTHLRRSIASVRISNLSDLADRSDYGIDVLETANPLAGTPPRLASTKVFDHYRRQSIWALLAKVVDAIESADFVEL

SEQ ID NO: 14767 - protein, 691 aa, BradyrhizobiumColbertium
MTGGFSKLRHDMLPAPEDDPEVTDLEAAIEGQPDAVPARGPDRPNARLNAKKVRGAIVAEAFRRAAPPSLRRAIAAGRPVASVVQVPSSAWMEAVDEYLSEARVMTIARAGSNKSIDVNHVGNEEVAKCLVAGRSVVGISTDPQRFLPTTLLLSADVTVKLVPPDAKSVRVLLRTLLPLTGRIPSSRIADTSGLDLNDLVSIFRSGSTASDALERLATLAMRRRQSSPHVEGAPILSDAIEFGGAARIFGLNFVKDVQDWRRGSIQWAEADQGAILHSEPGHGKNFFVNSLALAAGTGLVVAKISDFFAEREGHLGDVVKSLRAVFSRARAEAARFGPSGQRGCLLAFDELDELPSRNRLSRHNSDFFSVVVGEMLTSLDSVMSDNESNVGLCVLGMTNRLDAIDPALLRPGRFERTIEIPRPDAAGLANVLRYHLRGTALEGMDLSSAARLLEGISPAEAMDVARAARRAARRAGRPLNVDDLVREGSGPALPQAVLRRVAVHEAGHLVASIATGGKPLSARILNRGKIGGDARLNFDDNRVWTLDRLETHVVFLLGGLCAEKVVLGSVSTGAGGTQLSDLAICTSLLAAAFTSTPLLGGLVYRGADSEALAMVSRDARLAKQVDDRLKMLERRATGIITRHAAAVVRIAEALVARRYVSGDEAMDLFRGRTPVRQPIATVATDTPRNTP

SEQ ID NO: 14768 - protein, 157 aa, BradyrhizobiumColbertium
MDPEILEIGFLGTAGTEAQPVDIQVVTFRTNAGWRYLNIEVARPLRSLGEADAFDRELRARGLAPYTLTGADILKEPRFSTARAIWTYRRFSVPPDMRHRLLAALAEDGPMSLHHLCTLVPGPLDPFASVLSLACRNEVEIDISTPLSPSTTVRSRS

SEQ ID NO: 14769 - protein, 267 aa, BradyrhizobiumColbertium
MRIWTMSDLHIETARGWDLPSPSQRPTYDVFVCAGDLMPGFARGVKWLAERIDDHPVVVVAGNHEFFGRDIDRELDKAREAALGTSVVVLDDEAKLIGGKGGVLIAGAVGWTDFDLYGTPEKSMLAAAASMNDYRRIRTDRYARRLRPRDTLARHRKTREFIWSTFGGPKTSKRLLVTHHPFHAFGGRSRPASTTDEQDLLGPAYASRCPEVFALGLDAAISGHTHVSFELAVEGVKLIANCKGYGPWDAVSRWENDDFDPCFTFDI

SEQ ID NO: 14770 - protein, 178 aa, BradyrhizobiumColbertium
MCEWRQRLIDRFPELFDGATVAEHVPGLSLVDDGWQQIVCRAVARIAAAVGTSSLKITAISRRSGVLRLDYHRSSSIARLPDIEAAIQYAIALAEAGSACTCERCGREGCLHQVGSELVTACLAHSNGVRVRNVRGFENLHVVRSFDGKRPGPIILGRYDRITDVFVAVDPRSLPAKE

SEQ ID NO: 14771 - protein, 201 aa, BradyrhizobiumColbertium
MCVDIPGHPSDLRPFLTAKSPTPIPVGDAVRFDLLIQLALDPAVTAIEHVASVTLCGVAYPLDLLLATRGNARLILDVGPPLRDLDDEGTFLLAADELRAMIVPLSSDQVQALPRSSNARLIWAYRKRLVPADGRERIFAAIENDGDCTVASLGFGLRDWVFALACEGAVTIDIDRDPIVDARVCLGRFARVPPLRSHAPR

SEQ ID NO: 14772 - protein, 67 aa, BradyrhizobiumColbertium
MKRPKIDVSEAREGEEGRRQILLYLPKDLIKALKSAAIEDGKPAYILAEKAIDAYLKGRKVRSRSAK

SEQ ID NO: 14773 - protein, 382 aa, BradyrhizobiumColbertium
MKPQDDALLDVIYGAIANPESWPDVLTRTSDHLGAIGGLITQVPKRGRPLTVMGRLSPESLETYHKHYQWNLWSEAMRSAPSGKAVAVNSLTELGAIRKTGFYTDVLAPQRIVDAVQFSHQSMRLGGGVGGFGFMLSARGADSMDESLRRLQRLVPHLGRALDVTMRLGDLEDGTRQLGRVLQLLPTPALLLNGSGCITLANPAAEALISSGDGLRAERNGGLRLAAALPTETNALHRALRLSLAVALGAGKELGYPLRLTRPSGAAPLLVLSVPLPPPAFVFWEMLPQARVLVLILDPSTRSRASVDAVQVTFGLTPAEARVAVLIGSGLSGPEAAALLGISPATVKTHLKQCFEKCGVHSQVALARVLGSLPTDLRGLRS

SEQ ID NO: 14774 - protein, 298 aa, BradyrhizobiumColbertium
MGSFVGIFITVAALLGGFAAMGGHLAVLMQPWEFVIIIGTAVGTFILANPWKTVVDSGVACIQAITNAVPGQRYYLDLLGALHALMRELRGKGRNEVEAHIDDPSSSEIFKAFPSVLGDPSLLQFICDYVRLIIMGNARTHEIEALMDEEIHTIVKGKLAPYHALVTVSEALPALGIVAAVLGVIKAMGALDQSPKLLGGFIGAALVGTFAGIFLSYGIISPFAVKIKMMREKKCRPYIIVKQTLLAFMNGAMPQIAVEHGRKMIASSERPSIDVVENETIAGPKPVATDAEPKAARA

SEQ ID NO: 14775 - protein, 80 aa, BradyrhizobiumColbertium
MLGGTFGYAAIQTALVQPARTGEGQRIDVALMHCMLNLLVFELQEAQFPRSVPPAAHWAGGAVDGHILIAPIAPRNSAAL

SEQ ID NO: 14776 - protein, 45 aa, BradyrhizobiumColbertium
MRIGEGRAGIAIFGGGHASLPESVHAFADGMPLCPFSTAASSRSS

SEQ ID NO: 14777 - protein, 81 aa, BradyrhizobiumColbertium
MWIVFRPLDLPTMPKRVSIELKGKNGHVDLTFANTNAHMFQPPVKHLIQPGMTVHQTGAAAAIRVAAPEFAVADGVSGRTS

SEQ ID NO: 14778 - protein, 150 aa, BradyrhizobiumColbertium
MARLVCQRMNLQYDAALRRKYGTYLIVGACITFVAMIVGSVVEDLKLIDFAAVAATISPAIFWTIREHFRQSDSAATYETLKGEAEKFLESVRASGCDDAECGKRSRELQDALFQRRVANPLVLPLVYRLMRDELEKQAQAGADALLNRT

SEQ ID NO: 14779 - protein, 146 aa, BradyrhizobiumColbertium
MNEIAHDQDAPEFQRLLKARQRVYSYATRYQILQIILTVVVPVAGAMLAFAHQAARRYVALYGLIATALDVTWIDRTQRRLLKVAAKISEEFDCGVLKMPWDPFVAGKREDAEVVDASARRWSDEAGMWEFPRPRGTPWPVSSASA

SEQ ID NO: 14780 - protein, 449 aa, BradyrhizobiumColbertium
MKLVSLVDESLKDTVNLNKTRIDLLEASIPALRSFVRDSDWKPKVRSFVEQGSWAHQTIIRPVDGGEFDADLLVMVDPVDGWTAADYVESLGRVFSDSKTYEDKTKTWDYCITITYAGDRRVDLAPCVVSRLWEGSLEVCNRKGSFELTSPVEYTEWMKERNAYSGNNSFRKVTRLVKYLRDIKETFTCPSVLLTTLLGNEIQWFEKGTDEFADVPTTLKTLMGRLDNRLRMYPTRPTVTNPKLQSEDFSPLFGTDEQYSNFRTVIARYRKWIDEAHAMEGRQESIKAWQKVFGPEFAKADVVKAAADGMSESAGTSLVGRFLDSTAAHLGGIVDMVRDYGLSILPAGFARPPHIQAPPWRSVAHPAEIAVTAEWRSASHVQGGRMVAAGQLLKGQGSLYFRASLADGTPVPPEYSVDWRITNTAEAMSKKAGRGGFEISNKGAADGSS

SEQ ID NO: 14781 - protein, 418 aa, BradyrhizobiumColbertium
MNHYEPGDRIMLFGFSRGAYTVRSLANLLMLCGVPTKGPDGPLMRYRKQVKDIAREAVDTVLEHGAGHPREHYEAERLELARRFQIKYGSGDGSDSNVAPYFIGVFDTVAALGASGLRYFVIQAGLAAGVAAAAFVGGFRPAVGIALLCSWLGAGFMLCGFLAQIVIVAGALGAFWYWQNKSTTKTIVDYPTPGESRSHKAEWKGANFDRLLSRHVAFARSANAIDERWKDFDRVGWGGGNEGPPVFPGHERLRQWLFAGNHSDVGGSYPEPESLLSDVALEWMCREAISVPDGLITGPIYVDGIKMEGSGDVGQALNIRPDAGGVQHCEIAGMRDTIDAMAGSLPNWRWLRHLLGRQNWEVKIRDIGNASKVHSTVGRRFELPSVVQCSAGSAPYRPDALAGHDDFKRYYPTKADAT

SEQ ID NO: 14782 - protein, 196 aa, BradyrhizobiumColbertium
MSDTEAVSGTRPQDPEHLAAEEVLKALEVFSAEDKLRLKLIERRRRSGTDFGEGELYHEALCLTLIGRRKCPIDVPLIAFLAKTMQNLAYHRRAKLKRERKNAKSNAEDIQDLQVLTDQHNPELSLIEQEDTDTVTAIYGCLDGDEEAQFVVMALADGKRGKELRDEIGIDQAAYDYAMRRIKKAVKKRFPEGLSS

SEQ ID NO: 14783 - protein, 143 aa, BradyrhizobiumColbertium
MTRKNRGRNELQRISDAFDEDILNASPAQLRELLAEEGLDQTKIVAEMDAILEQAKRSFGRAKLDQAKTAIAARGSEPSNVSAIDRECVRGKLGAIRSGAGENMEGMMTAARQGKKLSARDEEGALDDLAQLEALENEGDPGE

SEQ ID NO: 14784 - protein, 244 aa, BradyrhizobiumColbertium
MIDLGISQPKDIDLDAIAWTRGAVVNYRPMDGCEARIIGTKRKAVISVNSLSMPERRRFSLAHELGHWHHHRGRILFCGKDEVCNFRDDALNPERQADDFASDLILPDFMVTPRVRKMKRPTLSAIRELADEFRVSDTATAVKIACLNRFPIIVICHGKTRRRWFRRSKMIQNWWFSSDTLDRESYAGHMLFNGEAEQNFPRKTPAEAWFSFKGCDRSEVEEQSFLLPNDEILTILKLPDEAVA

SEQ ID NO: 14785 - protein, 101 aa, BradyrhizobiumColbertium
MLAFELPTTGAPALALLLETARKKTVRLWAEQSPFELKDSLKRLGYRWSDGADGRPKSWYVDVCETALDDEIAFLKAEIYQRDISPTMQTLTAFTKFSARI

SEQ ID NO: 14786 - protein, 154 aa, BradyrhizobiumColbertium
MGQEVRTCVLLDTETTGLDHTKDEIIELGMVKFDYTTDGRIVGLRDTLSAFNEPSAPISAEVTALTGITDAMVAGQRFDDSAITAFADDAVIVIAHNSAFDRKFAERYRPVFEHKAWACSMSEIDWAQARIRRRAVGLPAERCRLLPPRAPHRR

SEQ ID NO: 14787 - protein, 453 aa, BradyrhizobiumColbertium
MTSKPKPGEAGETLEVRYGGLLVGLLRRRSEEIQDIEFVYDEAWTKDPNAFAVSTRMPLAKPVHEPDVVYRWFLNLLPEGRTLKTVGTILKIPEANVFALLEELGEDLPGALEVLRPADQRPKRTPRYRRLSEAELAAAIRRLPEKPLLVGEEGIHMSLAGAQDKLPVARYPDGGIGLALDGAPTTHILKPANKHFHSAVENEAFCLRLAAKVKLPVAECTIGKAEDLDYLLVRRYDRVPEGRSLRRLHQEDFCQATGHIPSTKYEANPATRLRGPSMKDCFDVIRKTDNGAANAARFLDFFVFNILCGNVDAHSKNYSLLLLPGGAVTMAPLYDVMNGDIYPDVTRNLAMKIAGKNRGRYIHARHWDRMAEENQISGAQVRRRVGELSQAVLDALPSVVDELNALKKSPVYQQISDCVAVNCRDMLRNLKSDVEDEPEEDPEPQGARPLGFS

SEQ ID NO: 14788 - protein, 93 aa, BradyrhizobiumColbertium
MAITSTAELGELIRNRRASLGLRQQDVALAANVGVRFIVDIENGKDTSQIGLVLRLLQALGIRLTPEMSPVPTPPPAAEESEAFDPDNFSPTP

SEQ ID NO: 14789 - protein, 127 aa, BradyrhizobiumColbertium
MLLCALAGKAALRLSRSTGRLAKTLSRTLAKLAERDDLEATLVDENASEDEKQKAKLKLGGLSRIADSTLVVVDEASRSISRRSNAWSNGSAPAAGCSWSATRPNCRRPALAWFFTSSSAIPRSPPA

SEQ ID NO: 14790 - protein, 68 aa, BradyrhizobiumColbertium
MPYFSPFDGPIHGISFVDPSSESLAGALDDVIGRLGGPADVLVVTAIIGGAAGVEAVNERQHTPPHRH

SEQ ID NO: 14791 - protein, 474 aa, BradyrhizobiumColbertium
MAVTLEIDHAKARAKAAAAAGLPVVPQAVQGPIRRIKWGILLLTLSIYYVTPFIRWDRGPNAPDQAVLLDFANGRLYAFFVEIWPQDLYLVTGLLVLASTILILTNALAGRLWCGFACPQTVWTDLFLLVERLTEGDRRQRLKNIGVPLTPKRAVRIVAKHATWLLISLATGGTLIFYFTDAPDLLRDLAAGNFSANALTWIAVFTGTTYGLAGFAREQVCTFMCPWPRLQGAIWDPEAYTVNYRDYRGEQRTSAKKAAELRLRGEAAGDCVDCGQCVAVCPIGIDIREGPNFACINCGLCVDACDGVMAKLRRPRGLIDYESWANIERGRSKESLRNRLLRPKTVGLTAACLALAGTIGVAFAMRTTATLSVQHDRDPVAVRLSDGSLRNAYTVKLLNKSASPHRYTLSVGGIDARLSIVGSDGVAPIKVAADASESLRVTLTAADAEQKDVVFTARDETGSTLYATDRFVER

SEQ ID NO: 14792 - protein, 44 aa, BradyrhizobiumColbertium
MTDQSIARVRNALRVVINPELGGTSSISVLSTTSTLSEAQSASQ

SEQ ID NO: 14793 - protein, 138 aa, BradyrhizobiumColbertium
MTQYLDLDVRPILRGGEPFSLIMAALEGLEVGQGLRLYAPFKPVPLFAVMSEKGLPTPTASSTERIGKCCSHLSEQRRTPDLAPERTRTSPPGPSLSWSSTTATSPLPREPVFLFSQLEKRGFRHDGTTYELTVRAPS

SEQ ID NO: 14794 - protein, 62 aa, BradyrhizobiumColbertium
MAAPDRPGTFLLIGLASLCATVAFGAVLALALAGWARQNGEAVLARGIPLHAIAGLGGCWLR

SEQ ID NO: 14795 - protein, 71 aa, BradyrhizobiumColbertium
MFRERWVLPALGLLTAGGLADCGVYGIGGRLPSAPWVLLFGAVLLVASFGLVVVDLGLTAWPRPTGPARSS

SEQ ID NO: 14796 - protein, 856 aa, BradyrhizobiumColbertium
MILLRSPKASILTCCFPEFIRMFMGEAMNHELMFAALNATNEAILRSTSSSELYQRVCDTAVHGGHIRITAVLIPNDAGSLDVVAATSETGFIPQISISVDEASVHGHGLAGRAYRSGRPALSNDVVQDDTLKPWREHSIACGVGSTVAVPIIQRARSIGVFLFCFAAPDSITSEISALLERVVENVAFALERFEGVERQNRAELAQREAENKEAALHRMYIALCKTNEAMMRAGSREELYDLVCEAAVLGGHFTSTTIALTQPDDHFLKIVSTKGQNADRVRSTAFSVLAGHPQGKGLTGTSLRSKLPCIKNDFLRDAGTSHWHELAEKGGTRAGASFPLFRDGDAIGVLLFLASKEGIFTCEIVELLARLAENVSFALHNFDRADANKIAEERIRFLATHDALTSIPNRSMFNTMISEAHQRASRAPGRRFAVLFVDLDRFKMVNDSLGHTAGDQLLIEASKRMRANIRAEDVLARLGGDEFVVLVDQLAGKDQVTAIAQHLLEAFESPFLLCRHECRISCSIGIAIFPDDASDPEELVKQADTAMYAAKAGGKNAYRFFSIELQSQSLKHLVLEADLRRAIERDELFLHYQPKVNSARRIVGVEALLRWQHPQKGIIAPAAFIPMAEESGLIIPIGRWVLETACRQSIVWQSLGLPAIPVAVNLSPKQFTDHELLEFLDRVLRETGLAPELLQLEVTESMVMQDVTHATGLMQAINRRGVRLAIDDFGTGYSSLSLVKSFPIDTIKIDRCFVGGIGESAQDRAISAAIITLGQALGLTVVAEGVETAEQDAILKDFNCHEFQGFLFGRPVSADEISRLLGGSDSQRVPSPSLVWADEREERVTPALPAFDDIT

SEQ ID NO: 14797 - protein, 71 aa, BradyrhizobiumColbertium
MLLRRNAGGFRFVEEKDGARIPTVPGKFRSDPHEDVNVGWHRPPSSAVVQSFMDYFEKLFRQPRRAPAPAS

SEQ ID NO: 14798 - protein, 156 aa, BradyrhizobiumColbertium
MSHAMVLRAGIGGGGLWSISRGLARGLAGRHEYKMAMNAADSPRRGDLDGRGNLSQAALIEFSEWFMKVMLDQIRFSKAVFRLDGIEERYKDLLVHLGLESRAVDLVAAAFRMGQLERGEAASVLRVPERTARTTVSKLTQIGFLKSKTPKGALRT

SEQ ID NO: 14799 - protein, 140 aa, BradyrhizobiumColbertium
MRDHAVVKGLQRAELARRTGCNLETVRYYERVGLLPEPPRTSTGYRSYDATHERRLRFVLRARELGFSLDEIRELLHLVDERDQPCSEARAVAAAHLDDVRAKIADLKRMERVLKGVVAQCADGTLPECPLIETLFGKAA

SEQ ID NO: 14800 - protein, 152 aa, BradyrhizobiumColbertium
MDFGKELETSDMVAPRSGTADTAPAAAAPAFSKRTEVGHQRLVALGGILGAIAASSCCVIPLILFSLGIGGAWIGNLTALAPYKPLFVAGTAAVLGYGFYLVYWKPRRACADGAACARAIPSRLVQLALWIATVLVIAAFAFDYVVPLLLRA

SEQ ID NO: 14801 - protein, 97 aa, BradyrhizobiumColbertium
MKKSLSVLALIASMIPASTALAAERTVTFAVDNMTCASCPYIVKTSMAAVPGVKKVAVSFQAKTATVTFDDAKTSADVIASASVNAGYPAHLRQQGS

SEQ ID NO: 14802 - protein, 52 aa, BradyrhizobiumColbertium
MVMRIGAPQWRQREAIEMSRSVPDAKRVDCAHSVENAPLQCDLMAPVLVSDG

SEQ ID NO: 14803 - protein, 125 aa, BradyrhizobiumColbertium
MPAIVFTDPQVASVGLTEAAARAAGHTVGVSTIGLAQVPRALAARDTRGLVKLVADAGSGRLLGAHILAPEGADSIQTATLAIRQGLTVDDVADAIFPYLTTVEGLKLAALAFSKDVAKLSCCAG

SEQ ID NO: 14804 - protein, 144 aa, BradyrhizobiumColbertium
MTRWLADCGPDVLEDIRVALIGNLYGTLPVFIGGILNTLLVAGAIAARSPTPLFVAWLVIEIVICLTRLAVLIVARRRALRHRPTPTDVNLLLSNASSASVGYGALISLAIGDWVAATLACVSAGAMVGGSASATSVRRGSAER

SEQ ID NO: 14805 - protein, 40 aa, BradyrhizobiumColbertium
MIVLSLGPTIPGALIAAQPLMLVLFFPIPMYLAAPWSASS

SEQ ID NO: 14806 - protein, 123 aa, BradyrhizobiumColbertium
MRGLLREGDLPARLGGDEFVVLAVGCTAEEATAFGHRLIETIGAPYDLGSGTLARVGVSVGIAMAPEHGSEAADLLRAADAALYQAKFDGGSRCQAASGDDLARLRCLVSRSAAEPALQSAAA

SEQ ID NO: 14807 - protein, 43 aa, BradyrhizobiumColbertium
MMVLHARFGRLPNTLNDRLQTLSQATSTGSSSRVQPPPLSKKR

SEQ ID NO: 14808 - protein, 70 aa, BradyrhizobiumColbertium
MLVAHQFLEHEFDELRAKVSTDYARGRLATARISTTIFSGGRVRKLITVDLDENPLLRGMVEHVRKECTI

SEQ ID NO: 14809 - protein, 403 aa, BradyrhizobiumColbertium
MLDPQTYDTCHTREYWLQCGRAAMAALRSCCLLSPEEISFLHRDRFMPDGQAIVCVRDTFEARNRDIPLIEAARLVVIRYIEATPEKFKSSRYLFVTPKSARLNRSTVKLSLNRAARRKGICDNFMEASAATFVNAVYHDPVDDGAALLLTGRSLADAGFTVPPTTQRLRNCLEQYHPLRDLNSIGFFEAEQRLSNLAADIRACKEPRRLQHSDRQLLRRQHLPEAVKLFDEGVVTQVAIGRYFGLDRHQVYMWFKRYRRKGREGLIDRKRGRLTPEWRRKTMELYEKMSPIKSRHAFFKQLKKRKFPYGYTTLNKFLNEAGERSPKKEVMTEKWRDLVDREFAKFERPPQKRELLSYLQEEFEFPYDRKTLEKYLDRAGLSPIRRGSIRGNRDKATEVRPEC

SEQ ID NO: 14810 - protein, 471 aa, BradyrhizobiumColbertium
MTLTNGVSHDDAHDIVEVVINRTGLRTLDKAGKRALAAARAETAADKLTAADGLPANQTELARNWQWVLEDAANRLTSDALEDYRRRLHTIPVKEVLIGAALLDDLGPRPPVIASAKAHNEWKAKARVYLRIGLYFGRLTYGQMSKKACAGYFKACIAISTEAAERGRRGLSYTTIKKDLEYLQRAVREYDENNNLGFHPNVDIPSDKVRRTAYLLRSEAARLLWVTRGRVWNRETGTWVKTVATEGRVWDKEKGDWVKADGRVVNFIDKVTKDHSNGMGRAFRVEIYTGWRSENMFRSTWKRHPKHGSIDVETGMVHRTGYAQPQNTKNMHPSSKMLKRLLQHAHRWKKADDKEGHRHIIRKRDGEPYKSIHEQFVKLVEAAGLDHEILIHTFRHTLATWSAIIGVDIHSTAKLMGMTVDTLGGSISTSPPPPRTTPSRCGTTPRAARGSVTSPRRRIRRTIPSTTTISR

SEQ ID NO: 14811 - protein, 232 aa, BradyrhizobiumColbertium
MAKSPQLVAAVAKVVKKPEETVRVALRRLHEAGLIEVTGRGRGGKHMTARDAAMLLLAMSMGTMLKDSPTTIQDYWNLPLLPTDPHRFDVLGFPPGKRPGLTPRYFARMFTKKITPVDTLGVVLSTIIERACAGMLFPRPDRGDFAKPPEPHIPVPAEVPNSRLQVKIYAPWRAASIHLRMNLQWQSEMLFGERATLGEEAFPGEDRLANVDYVEIRQFSELAILAIGESLR

SEQ ID NO: 14812 - protein, 171 aa, BradyrhizobiumColbertium
MARAQEGDRAAYHRLLQEITPYLRSLAARRHHDPSDVEDSVQDVLLTVHSIRQTYDPARPFAPWLVAIANRRFIDRLRRQGRSREIPLTAEHETFCEPAANFEERPDERALEGMVDHLPPAQQNALRLLKLKELSLKEAAALSGMSVTSLKVNAHRALKSLRRKLLDRSEP

SEQ ID NO: 14813 - protein, 159 aa, BradyrhizobiumColbertium
MAAAALTGVLAAIAAFLVSLPDRSRLWLLLPIPALILWLSNVGYQCLTQWVAIGPDGISLGEAARCFATLVLTSLPLSLAMLVMLRYAAPLRPTAVAFMGSLAVAAITATALSLFHVIDATVMILLWNFGTAVLFVGLAGVFGRKMFRWVAPRTLYAKD

SEQ ID NO: 14814 - protein, 185 aa, BradyrhizobiumColbertium
MTNMTSPVPLFPRQPVPPLHVEIASAGSFDLAGEKPAQFTLVVFYRGLHCPICKTQLRELESKLDEFDRRRVAVAAISSDTKERALQTRETWGLTRLRIGYGLDLALARRWGLFISSGRGMTSTGVEEPARFSEPALYLIRPDGTLYFGSVQTMPFARPHFSDILAAIDYVLKNNYPARGEATDV

SEQ ID NO: 14815 - protein, 329 aa, BradyrhizobiumColbertium
MRIAFAWFLPTVALQLAAGPIPAAAHTITEFVLATAASRPSAITRGPDGALWFTEAAGRIGRITTDGELTEFPIKGGGVVNAITTGPDGALWFTNFTSKKIGRIPATATAENLLVVEFAVPGPAGPLGITSGKDGALWFTDGAGGKIGRITTTGEVTEFAVIPMKARAITAGPDGALWFTDARDKIGRMTTEGTVTEFTIPTENSGPEGITRGPDGAVWFTESLSGKIGRITTDGKITEFALPDPNAQPFGITTGPDGALWFTEASCVRKRGSRCVIGNKIGRITTTGLVSEFAVPSDGSGPHSITAGPDGALWFTEYYGSRVGRLVLP

SEQ ID NO: 14816 - protein, 125 aa, BradyrhizobiumColbertium
MRDRMGNMGSGMMDQRMGGGMMGGGMMGSSAGGMMMDRDMMGGGGARSGMGALFGSRVTPVMNLSIDDVRGYLDMQLNRLDNKRLKIGDVKSDDANITADIVTLDNSLVQRLKVDRHTGAIEYES

SEQ ID NO: 14817 - protein, 289 aa, BradyrhizobiumColbertium
MAQYAHPEMLVETAWVAEHGTDPGVRLVEVDVDTAAYDQGHIKDALAWNWTTQLCDTLERDIIPKDAFETLMADSGIGNDTSVILYGDNNNWFAAWALWQMKIYGHQDVRLMNGGRKKWLAEGREITMQAPTVARASYRATEPNNSLRALLPEVQQAFENNSHTLVDVRSTDEFTGKILSPPGLPETCQRGGHIPGAKSIPWGMACNDDGTFKSPDELAALYEGKGVSVGRPTIAYCRIGERSSHTWFALKYLLGYDDVKNYDGSWTEWGNRVRAPVARGPEEGSQKAA

SEQ ID NO: 14818 - protein, 245 aa, BradyrhizobiumColbertium
MTELTANAIAAAFAAGLVSFLSPCVLPLVPGYVSYIAGQSVSQSKPNSLVARAQAITLSAFFVLGFATVFVILGASATALGQALNSYRYELNLAGGAIVIAFGLFTVGLVRPSWLQRDLRIDVSLPRGRPLATYVLGAAFAFGWTPCIGPMLGTILTVSAASATIGKGIAFLAIYSFGLGVPFLLAAAFTDGLLARLRSIGRIGYILQLFAGGVMIVMGVAMITGYLSNFSIWLLEAFPALSTIG

SEQ ID NO: 14819 - protein, 268 aa, BradyrhizobiumColbertium
MDMDSKPRISRTTGRMLLVLLVLGVFGAWFAFDPGFRSLRSSLFGNGAEMLQDEFDRRVHDYVMAHPEIIVQSVNQLEARARAAEQTEAQKVLQARADEVFRDPDSPVGGNPNGDVTVVEFFDYNCPYCRQVAPVVTKAEENDPQLRIVYKEFPILGPNSTFAAKAALAADRQGKYVAFHRALYQVRGTVDQGKTLDVAASVGLDLGRLKADMDDPKIRASIEKNLGLAQALRINGTPGFVIGTQILRGATDLNTLQTWIREVRDHRQ

SEQ ID NO: 14820 - protein, 251 aa, BradyrhizobiumColbertium
MITVRFDSNVALGLPWRFEPLQQEVKVHLGEQQLVFFTAENLTDQAIVGHATFNVTPPTTGIYFNKIQCFCFDEERLNAHQKVDMPVVFFVDPDMASDSETRNIDTITLSYTFFRSVNPDSAKDLSRFAVAAEPDPVRGQRLFGERCAACHAIDSNKAGPMLGGVLDRKAGAATGYKYSPALAGAGLTWSAANLDRWLADPRKFIAGARMPVRVPDASARRDIIGYLQKVKADVSARASFTSPEDRSNGHP

SEQ ID NO: 14821 - protein, 167 aa, BradyrhizobiumColbertium
MKYTRLIPILLLQLLFGGQAYAQTSGQNTIVVERPWARATPTGAKSGVVYLTLINNGGSGDNLLSATTPVADQIQFHSASEENGVSRMREMRTVEVAPRARVTFSPGGLHIMVVGLKQPLKEGQTFPLTLNFEKAGTREVTVPIAKVGAMQAEDTPGMTHRHGDMAK

SEQ ID NO: 14822 - protein, 161 aa, BradyrhizobiumColbertium
MSTKGESVTDQSFRGKWLLIFFGYTFCPDLCPTALANVSVALEKFGTDTSRLQPLFITVDPQRDTRDVMADYLQSFDPRILGLTGTQAQIDSVTKEYRVYVALDKTERSGNDYLVSHSAYLYLMDPQGKFVNVIEGNEGGDAIAAWLRKEMSGSVRGWRFE

SEQ ID NO: 14823 - protein, 130 aa, BradyrhizobiumColbertium
MERASQQGLRHLIHSNMEGSMQTGWLFAATANGVRRVMDCFCLWQDAGKLGGQAYSVGYDPKQPDHVYAATVQGLFRSGDGGEDWDELKSPSADVIGIVVTPSGDLFVINAKGRLYKSEDQGGTWTQVNA

SEQ ID NO: 14824 - protein, 37 aa, BradyrhizobiumColbertium
MMKQMSQMMDHCNGMTGNSRPNEQWRRNEPSQPDHKE

SEQ ID NO: 14825 - protein, 172 aa, BradyrhizobiumColbertium
MAQDGKTFVMHAAPKPIASIQFEDAQGKVRSLADFHGKVVLLNVWATWCIPCRKEMPALDRLQALFEPRDFEVVPLSIDRGMDVVRKFYAEVGIQKLGLYRDTSGNATRELGTVGIPTTLLIDREGHEIGRLIGPAEWDAPQMVAFIRCVTSGGAATLSQAEAKPTTSTCQT

SEQ ID NO: 14826 - protein, 198 aa, BradyrhizobiumColbertium
MAIEEILTTTANSDLRSRPLQRWRLVFWLPLGVFLILVVALAWGMTRNPGTIPSVLIGKPVPQFRLPPVKGRTLGLSSEDLRGEVSLVNVFASWCVACREEHPIFMQVKADGIVPIHGLNCKDQPDNAARWLNTMGDPYTHTGADISGRVAIDWGVYGVPETFVITKDGHIAYKHIGAVTPHVLEEKLLPLIRRLQQQ

SEQ ID NO: 14827 - protein, 173 aa, BradyrhizobiumColbertium
MNRRTMMIITALLALSGLGAAAGIYTGQTRTPGGASTDQQPVTGPVLAANRPSATLYRNPNCDCCLEYAKYLHSNGFDIAVDAKQDLSAIRKQLRVPQRLEGCHVMVIDQYAVEGHVPVKTLNKLLSEHPDIIGVSLPGMPTGTPGMTGPKRGPFTVYEIPKDSAPAKVFSVE

SEQ ID NO: 14828 - protein, 234 aa, BradyrhizobiumColbertium
MKAPYALTIIAVLTSAALERAHADGNPQRGAMIYGACAACHSLEPNLHLTGPSLAGLWGKKPASVADFARYSNALKTRQDFVWEEASLYAWLADPKAFVPGTYMTFRGIQDDKQRNDLIAFLKLAMAPNGAKSVVAQGLIPAEEARGQAPEPLENAGPEARVTAVRHCHGTFFVSTADGKERPFWELNLRLKVDSGPTGPKGKPVLLPAGMQGDRGSLVFSDPAEIGRSIEEKC

SEQ ID NO: 14829 - protein, 470 aa, BradyrhizobiumColbertium
MSFLRDLKIDRRTFLVGSSALAAVAFSGGSRGAAMPGRELALAARPKRLQLVGAPYNDTDVWSYNASVPGPEIRIRQGERLRVVLDNQLPQATTIHWHGVRVPNGMDGVPFLTQKPIGPGETFAYEFECPDAGTYWYHPHHHSAEQVGRGLAGVLIIEEAEPVEVDRDVVWVLGDWRLNRDASIVDDFGNRMEATMAGRIGNTVTINGRVPETFQVRAGERLRLRLINASPARIFGLEFRKHRPVIIALDGQPIEPHEPPKGQIVLGPAMRADIVLEMNGEPDSKAFVRDTFYEGRAYRLVDLVYSGEPRLRERPLDPPARMRANTMPEPDLVNAERHSAVLQGGMMGGRGMMMGMSGGMGGMGWSINGVAATGHNLAPMLTLSRGRSYVLAVRNDTAWYHPVHLHGHSFRVIARNGRPTRYREWLDTVLIPPREQADIAFVADNPGDWMFHCHILDHQEGGMMAVIRVA

SEQ ID NO: 14830 - protein, 110 aa, BradyrhizobiumColbertium
MSAISPAEPSRRDFLYVATAAAGSVGAAVTLVPLISQMNPDASTVAAGAPIEVDLSPIAEGQIIKVFWRSKPIFIFHRGQKDIDGARRVDWHNLIDPAPDTERVKPGHDA

SEQ ID NO: 14831 - protein, 63 aa, BradyrhizobiumColbertium
MPAMVDAVVRAPTAHRERKAARCKAKAYDGVIEIEVDGITIRAGRGADTAMIASIVQALKASR

SEQ ID NO: 14832 - protein, 512 aa, BradyrhizobiumColbertium
MRTLRVLCYADTTTAVPHCAAAAEMLRVELGAHIIMLLERGVRIDETLSNSEIYWRDGLFVPSKHVRNSSEGTNKRKAAALTSRRIELFGFRNVLARSKLLRYIYSTIRRLYLILRNPPSLLRQARSWIRRISILAIAAELIWARQRAKTLREFLRKIRPDVILLVEDNVETLSTTVINEGCRQGIPSVIVPFTIPNPLEPAKFYRHRKLNPVNDFLSRLVVRIFPKWRYRLDGQDLIRVPAFTALALEALGQSSPAPWILNRGRAAKIALDSESQRDRYVQLGFPVSQLAVVGDIHSAILYRAAANRARLRLELMTKYSFVPDRPLIVCGFPPNQFGGEDDGQFEFSSYDTLSDAWIESFRSLGNRANVLIRPHPRASADRFSSFAGGNIRCSMQPTAELIPLCDLYVASISATIRWAIACGIPVINYDTYRYRYDDYEGVGGVIHVDLLADFRVQLERFVDDASFAECVSRKQREVMRRWGVLDDGLSRRFAMLVNEVTEGVRSRSVSGQ

SEQ ID NO: 14833 - protein, 616 aa, BradyrhizobiumColbertium
MSGKLQAYRDLLNLLLRYSKSHSGLLVSFVLLAVFGSLTESFGVFLLVPLLQTMGETNVFANIPVVGRFSELFDVLPVDQRLLWAGGLMSVVVLLRGGLQFAQEFVGYAIPHRIDFHLRLRAYSAFVDTSLQFTDTLGAGAVTNVMISQPARIGIALRFFATLIANTAVVASYIVLLSIVSPLLVVLATVYVIAATLTFRALTTNLVRSVGQELSRATELFSQIFFETLNGAKLIRLAGAVDDVRRDVESSVKRLQKARDLTVAVENMTVPFFSTVGGLLVCFIVMAVGMLRTETAAQAVGVLVIFFVLLFRILGPLSIISISRNNIIIHLDAFREFDAFLAAAEKSRERDGSIKLETFKNAIQFEDVSFSYLAEGPSVLQRINLVVPRGHTVAIVGPSGGGKSTIINLITRLYRPNSGRILVDGGDLNDLAITSWWARLGVVTQDIVILNDTIRANLNFGLRRPVADDQLRRAARLAAIDDWIESLPDGYDTILGDRGSRLSGGQRQRLALARAFVRDPDVIVLDEATSALDTLTERAIQRQLESLSRRKTMIVIAHRLSTVRRADTIFLLEGGRVVEAGNHNDLIRKRGLYWEMIESQALNLIDDDEASAVNVE

SEQ ID NO: 14834 - protein, 649 aa, BradyrhizobiumColbertium
MQTSHKYRPEVDGLRAVAVLPVVLYHGHVPGFSGGYLGVDVFFAISGFLITQILLGSLDEGSLSMRLFYERRVRRLLPALFLMLLTSLAVGTVILPPPLLVNLAESTIAAVFFGANFHYLQTTNYFSAPGELLPLLHTWSLAVEEQFYLLFPIALAWIHRYARKMLQLILCAAAILSIISAYRENQVDAARGFYLLQFRAWELLAGAVLATLPRKQSNLLPPIGLLMVLAAIFLLGNRANSGIGSLLAVSGTVLILGYGGTDFASRILSLPPLVYIGSISYALYLWHQPVFAFARHALINAPSPTTVTSLILFAGLLAALSTHYFEQPLRRAATFRSVATVSSSAVALLMTACFLTSQTEGYPQRYTAQQLALLSARPERGVASVDGKSCRRPIAEACVIGAKVVPTFAVVGDSHADTLTASLSKVLAQHGLAAFVYTNPGCPFIASVIEVIDLYHCGELMNQVLAALKLHDIKNLIVSDRSTAYIAGTRFDNGEGGVEPGAPFPVAPVGFSGADQERQEATLAAMRSTLIELLDTGINIYHVIPIPEVGWHVPQTLAKLAARRAPPITTSVHRYLDRHAPVLKLAAELSTNARYHPVYPHRVLCDHVRCRTVLDGKVLYTDTDHLSSEGAALIVPEIEKLLKENPVGP

SEQ ID NO: 14835 - protein, 580 aa, BradyrhizobiumColbertium
MATAVTVTKTNNSEIDGLLSGYKWSGAITYSFPDAPSDYANPYSGGNSETTRSGFASVPSQIQAAINYAMGLILGYTNADIQYAGTNGADLMIAQSSAANPTAYAYYPGNYASGGDIWFGNQYNFSLAKLGNYYFTTALHELGHALGLKHSQDAGGPGNVAVPSAHDSSEYTVMSYRSYVGASTTGGYTNEAYGYSQTYMANDILALQTMYGADYTTQSGNTVYTWNATTGQQFINGVGQLAPGDGVGGSANRIYETIWDGGGVDTYDLSNYTTNLSINLNPGASSLFSSVQLAYLGNGHYASGNVYNAYLYNGDARSYVDNAIGGSGNDTIIGNAIANVLSGGGGNDTITGGAGNDTINGSSGTDTALYSGIRANYTVSYNGTTQAFTIVDQRFGSPDGADTVTGVENFHFADVQISSGTLAAQVTPDREVVVYDVQNDQAWTYQVFGYDAEDRLNHLSVKKDDGTSTLTDYNSSQMHNFKMAVSQYDSEDHLTSVSIYPNNGANHSLLVTTYDPQHVQSWKEAISGYSVAGQIEYVTVEKYDGTSAYTKYSGGDVTVYNYAADGHLVSIAHAGAIVYV

SEQ ID NO: 14836 - protein, 74 aa, BradyrhizobiumColbertium
MAKKANSDASGGGSSTAGRAPSMPMARDPAAAVAEEYEAARRKGTREAFELFIARHGDSPLAEQARAELKRLSR

SEQ ID NO: 14837 - protein, 397 aa, BradyrhizobiumColbertium
MPIPHASEALSRFTVLDLTRVRSGPTCVRQLADWGAKVIKIDALTEDAAGEQPGGPRRGSDFQNLHRNKRAMALNLKDERGLAVFKRLAAKADVVVENFRPNVKKKLGIDYDSLAAINPRIVYGSISGFGQDGPYHKRPGFDQIAQGMGGLMSITGAPGEGPMRVGIPVADLTAGLFCAMGILTALLEREVSGKGQWVQTSLLQAQIFMLDFQAARWLMEKEVAQQTGNNHPTSIPTGVFKTSDGYINIATTGGRIWERCAQAIGAPELYAHPDYATAPARSKNRDALNAEIERRTVTKSTETWVRELNEAGVPCGPIYAIDQMFEDAQVKHLGIAQDVPNEEGRHIRLVGQPVTLSRTPSRMVAPPPEFGEQTEEVLKEFGLSADEIERLRDAKVV

SEQ ID NO: 14838 - protein, 47 aa, BradyrhizobiumColbertium
MGPIFKRISIPLGPFTIALVLGGRAEVAFRLSVIGSGGTFKVVGRKI

SEQ ID NO: 14839 - protein, 397 aa, BradyrhizobiumColbertium
MTKPCAGSSTSLVFFLINSIAIQMVVGQDAAIERFSSIYWALVLFALALPLFCIREIFRLLLGRGILLLAFLLCAGGYQLARGDLQVLAQLLLMVWVTAWCGCESTRITVSTLTDIFLGTLLMGVIVAMLTNLNPWGLFPGQTSAGYGPWRTSFFPHIANSATMSLVMLMILTRSTKQHDKKGIIALTVACYFGLFGFVRTVLVAAVIYFSLFASLAKVRPRPVLLIFTALGVILASIAVELAIAPFLEKVQDSPIVSRLLLRSASDLDSFAINQQLYRPWLWKEHMKIFVSSPYLMGLGNFRLLDHVSYNLVPGLEASGSESFPTRLLATYGISALLFLGYLTTFLIRAAYSRDFWACACFPVIVFVMMNWGSVFHPTNAFFVLFILMMRGDKAIC

SEQ ID NO: 14840 - protein, 557 aa, BradyrhizobiumColbertium
MRLSFLSRASLFRSSIVYLLATGLSAGAPLVLLPILTRALSPDEYGQIAMFSVAAQIFGIMTGLSTHGAVAMKYFDQDTIDFPRFVGSCLIILLISSSASLLVAWATLDWLKLYLTLPGSWLLIAVAFSACNFIVQIQLSIWQSGKKALSFAALRSFQGAMDLSASFILALILGLGWQGRVSGMVLASILAACFALYTMRRSGWICLPHGAVYMRDALRFGLPLVPHAAGGMLMMISDRFLVANVIGVASTGIYLVAAQLGMILYLVNDALNRAYSPHLIENLRLHDQAHDYQIVRFTYAYFIGILAFAIAFGLSAPFILSALAGPKFQAAGAIFIYIAIGQAFGGMYLVVATYIFYAGRTTYLAIVTVSAGLANIAITYCLLKQSGLVGAAQAFMITQLLFFIGTWVLAQRCRPMPWLKAIGLDPAIFVRAGLIGLAMTTYAFAFIPSNKWHPFFERPDNLPSDPMELIDAARVGDLIVMETLLARGVDINAANSLGVTPLIAASASSQRSAVKLLLSRGARRSDRTSEGYTAYDFAKNQLNDELARLLTQNGERK

SEQ ID NO: 14841 - protein, 52 aa, BradyrhizobiumColbertium
MNGRIYKRLSREQGTQISANDEIPEKLADNVELTTVRRSFDGRFASPTAVWG

SEQ ID NO: 14842 - protein, 502 aa, BradyrhizobiumColbertium
MEAFGLLLHGFAVLLTWKTLVLMMVGLVLGIFVGVLPGLGGPNGVAILLPLTFTMDPTSAIVMLSCIYWGALFGGAITSILFNIPGEAWSVATTFDGYPMAQQGRAAEALTAAFTSSFIGSLVAVLLITFLAPMISSFALKFGPPEFFAVYLLTFCSFVGLGREAKHKTVISMSLGLLLAGIGMDTVSGNLRMTFGSPELLRGINFLVAVIGLFGISEILLTMEERLALRGHAAGISLRVVLGVWRDLPKYWVTLLRSSFIGCWLGITPGGAIAASFMGYNLAKRFAKEPESFGKGRIEGVFAPETAAHASGTSALLPMLALGIPGSGTAAILLGGLMVWGLNPGPLLFVEHKDFVWGLIASMYLGNVVGLVLVLTTVPIFASILRVPFAAVAPMIVVSCAIGAYAIQNAMFDIWLMLGFGVIGYVFKKIGIPLAPFTLALVLGNRAEDAFRLSMIGSGGSLKVFWSNGLVGSITTLAILLLFWPVIDGLVGRVGWAQRTTS

SEQ ID NO: 14843 - protein, 188 aa, BradyrhizobiumColbertium
MATAFAQLMSQTDIEIVVDDPTAPEDDSPSVVSSGTVEIVVCLLLLALAATLGYDNWRTGASWDATGPEPGYFPFYLSIILGSGSLYGLIATLVSHRATRETFVTRAQAGRVMAVFVPTLLFCLVTQFLGLYVASFLLIAGFMRLVGKITLWKSLLTALVFTAIMFVTFDIAFDVIMPKGPLEAALGR

SEQ ID NO: 14844 - protein, 88 aa, BradyrhizobiumColbertium
MFQGTFDLETATPIDASALSDVLFERGIYWASGRSGIVDLVAAHKWFNLAALKGRKDAVALRQEVAGQMSEAEISAAQREARAWVSAH

SEQ ID NO: 14845 - protein, 76 aa, BradyrhizobiumColbertium
MDTNERWLPIQIAPDECDLELGRLDKTGILPWSFPCRRTDGVWFNVWAGEAVLISPSHWRIWRSGIWVRAGTRDSR

SEQ ID NO: 14846 - protein, 39 aa, BradyrhizobiumColbertium
MRAAGAIPIFAISIKSHCRRAKGIAATALTGAKALMSVH

SEQ ID NO: 14847 - protein, 49 aa, BradyrhizobiumColbertium
MTQAELLDHLYGLNEERSSNTIEVYVGRLRRKIGRDTIRTLRGLGYRFG

SEQ ID NO: 14848 - protein, 448 aa, BradyrhizobiumColbertium
MVRSLRARLLVGVILTTVTGIAVAGVSISALFRAHVTELVNAELIGHLDELEGLLARTADGHVALAQRLSDPRFAQPGTGYYWQVSDRNGIVLQSASLEPQRRFPPPARGADRQLTRSVEAGPAGEPMIAYERPWQTAENGYVLQIGADQRIVDDVLRHFNQALALSLGTLAIALIGAGTLQAWFGLRPMRRLRDALGDIRAGKAETLPGDFPSEVRPLVDDLNALIDANTQMVRRARTQAGNLAHGLKTPLAVLTDEARRLLARGDTEGAAVLTQQTGRMQRQIDFQLARARAAANAGLPGVITQVEPAFASIAAAMRRLYAHRELTIVHTAETELLAAVDPNDLDEMVANLVDNACKWARGVVSIKATRDTPTGQLLITIVDDGPGIPADALNRAFAPGERLDEAKPGSGLGLAIVRDLATLHGGSVELSNGRNGGLHAELRLPSA

SEQ ID NO: 14849 - protein, 148 aa, BradyrhizobiumColbertium
MITQLAAAYNNRGVALRSSGDIDRAMEDYDRALRLSPDYYVALNNRGVALMSKGELDRAISDFDRAVQLRTDYLGAYYNRGKALGRKGLFDRAIADYDLVIKADPKNPTFLFERGTMKANAGDQSGADADFERAESLRSNGARTTRPR

SEQ ID NO: 14850 - protein, 347 aa, BradyrhizobiumColbertium
MTRSRKAVDVADSYAVRLMQHLVVPTFVIDPQRRVVIWNRACERLTGVAAAEVIGTSKHWQAFYETKRPCLADLVALDRPEQLPEYYSEYAARGHNGLGFSAENWCVMPKLGSQLYLAIDAGPIHDEAGNLIAVVETLRDLTDQKRAEMALKELATKDGLTGLSNRRAFDQMLTSEWARAQRTQKPLALLFVDVDHFKLFNDHHGHQSGDECLRAIAAAVSRHAMRPLDFASRYGGEEFALILPDMDCDAACSVAEAIRCAVMALQIAHGALGAGDHVTLSVGVASHIPVSADGSADRLLGAADEALYVAKRLGRNRVICAEQVLAEFAAIGREAAAVPAPFRRKMA

SEQ ID NO: 14851 - protein, 1035 aa, BradyrhizobiumColbertium
MRQVFSMVTAGMSLAARNGWEALTRRGPVLWLTLCGVLLVAGIFTVTAMAVGEFRERTLANRERELENTVQLIARHFDQQFEDSDVVAADLIAQMNLEEITSPAMFRERMSGPATSQMLRSKISSVSYLGDIAIYDADGELISWSRAQPLPKINVSSRGYFQAFKTNPQSEPVILESVRSFIIGKWTTVVARRLNSADGSFLGAMVRRIDPDSYHKYFASVALAEGTAISLFDREGKMLARYPHVEELIGRNFKDGPLMQKVLAEGGQHTLRGNSPVNGEQRLGSAASLKHFPLVIIATTTTDAALVDWRQQTGFLVATAGFSAAVIALILYFIIRQISRQNREARERIEAKRMQLDTALNNMSQGLILYDAAGYIVICNRRYAEMFGLSHDVIKPGCHIREAMRHRKERGAFDGDVEAFCAEVMRIVAEGRVSTRVHQLANGRAFQVINTPLAQGGWVATIEDITDRRKLEQERDRNHTFLREIIDHIPSQITVKDARTRQYLLLNCVAEQLFGRSRQEVVGRTAFDVFPEAPAARITEDDSRALNSAKGLFKDEHAWQMPGTGLRYITSTRIGIPDETGEPRYLIHVIDDVTERRRADEKIAHMAHYDALTDLPNRTLFREQIERELAKVADGDQFALLYIDVDEFKGINDSLGHHVGDELLKAIAGRIRSCLKQGDLIARLGGDEFAVIQTAVQSPAEVVSFVKRIYGAIRQPYHCSGHQLSTDASIGIALAPQDGDDLDQLVKNADLAMYGAKAEGRRTHRFFEPEMDASAKARLSMEQDLRQALVDGGFEIHYQPLVDLRSGEVSGCEALLRWRHPERGMVSPAEFIPVAEDTGLITELGDWVLRMACNEAATWPTHVRVAVNVSPVQLKCDTLALRIAGALAASGLDPRRLELEITEAVLIRDDEAALSILHQLRSIGVRIALDDFGTGYSSLSYLKRFPFDKIKIDRCFVADIAEASGSPVIVQAVVNIAAASRMTTVAEGVETEAQREMLRTLGCTEMQGYLFSAPKPASEVRKLFGGDTGPVAAVA

SEQ ID NO: 14852 - protein, 361 aa, BradyrhizobiumColbertium
MMILSGDPPRSRVLTLVLILIILALAATPFLFPGAKALNVAAKICVFAALVASYDLLLGYTGSVSFAHTMFYGIGSYAIAIALYGMGPNWAAVATGIVTGLPLAALLALAIGLFSLRVAAIFFAMITLAVASAFQVLASQLSWLTGGEDGRSFQLPELLRPGTILISKNLFGFEINGRILTYYLVFAVSALMILALLRVVNSPFGRVLQAIRENRFRAEALGFRTVFHLTYANCIAALVAASAGILNALWLRYAGPDTSLSFSIMLDILLMVVIGGMGTIYGAIIGATIFILAQNYLQALMGAASTAAGEAGLPLLPGLLHPDRWLLWLGLLFIASVYFFPTGVVGRLRNPAGDKSGGRSH

SEQ ID NO: 14853 - protein, 336 aa, BradyrhizobiumColbertium
MTELAATDPLPKPKRDLAPILLPVALALLMIPLIGSPSSWLTLTAASLAMGMMIFIMASGLTLVFGLMDVLNFGHGAFIAVGAYIATLVLAPFAASVQADSLWMNLAVLGPAALLSMAVSGALGLVVERVLILPVYGQHLKQILMTTGGLIVAEQTLYALWGPQIIPMPLPTSLRGSFIIGDVAIAKYRVLAMLIGLAVFIAIQLVLNRTKLGLLIRAGVENREMVEALGYRIRRLFLGVFMTGSALAGLGGVMWALYREQVHASMSDELTVLIFIVVIIGGLGSIGGCFIGAILVAMVANYGGFLVPKLALVSNILLMVAILMWRPRGLYAVTSR

SEQ ID NO: 14854 - protein, 240 aa, BradyrhizobiumColbertium
MSDLLKLSGVHTHIGRYHILQGIDLAVPQGQVTMLLGRNGAGKTTTLRTVMGLWQASSGEISLAGKRIESLATPDIAKLGVGYVPESMAVFSDLTVRENLLLAARDGPLDDAQLDWIFGFFPALRRFWLSRAGSLSGGQKQMLSIARAIVEPRKLLLIDEPTKGLAPAIVMALIECLKEIKRKGATILLVEQNFFAARELGDNVLVMDNGTIVHRGEMAALAADVPLQERLLGLSLETHQ

SEQ ID NO: 14855 - protein, 258 aa, BradyrhizobiumColbertium
MPLTLETRDLTIRFGGHVAVNNVSCTFRPGELTAIVGPNGAGKTTYFNLISGQLRASNGSILFDGADITQHSAPMRTRAGLGRAFQLTNLFPNLSVEENVRLAVQAASGTHYDMLRPWMVRRDLIARADAILDQVALGSRRGGAATALSHGDQRKLEVALMIALEPKVFMFDEPTAGMSIDEVPVVLNLIAQLKQDKSKIILLVEHKMDVVRSLADRIIVLHNGQLVADGKPAEVIASPIVQEAYLGVAPKNATEGAA

SEQ ID NO: 14856 - protein, 394 aa, BradyrhizobiumColbertium
MRRSLILTTTILALAAGSSARAEDLKIGLIYGKTGPLEAYAKQTETGLKMGFEYATKGSMTLDGRKIVIITKDDQSKPDLAKAALAEAYQDDKVDIAIGTTSSAAALAILPVAEENKKILIVEPAVADQITGEKWNRYIFRTGRNSSQDAISNAVAIGKQGVTVATLAQDYAFGRDGVAAFKEALAKTGATLAAEEYAPTSTTDFTAVGQRLFDALKDKPGRKVIWVIWAGAGNPLAKLQDMDPKRYGIELSTGGNILPALAAYKSLPGMEGATYYYYEIPKNPVNDWLVAEHQKRFNAPPDFFTAGGFAAAMSVVAAVTKAKSTDTEKLITAMEGLEFDTPKGKMVFRKEDHQALQSMYHFKVKVDPNVAWAVLEPVRELKIEDMDVPVKNKR

SEQ ID NO: 14857 - protein, 674 aa, BradyrhizobiumColbertium
MSHHPALPYLRNSEKGKVVSAAEAVMLIRDGDTVATGGFVGIGFAEEIAIALEELYLSHEGDAPYTQGKPRNLTLVYAAGQGDGGQRGLNHFAHEGLVRRVIGGHWGLAPRLQQLAIANQIEAYNLPQGVITHLFRDIAARRPGHITRVGMGTFVDPRHGGGKLNARTTEDMVELIKIGGEDCLLYKTFPIQVGIIRATTGDPDGNLTMEKEALTLEALAIAMAAHNSGGIVIAQVERVAEAGSLNPRQVKIPGILVDCVVVSRPENHWQTFGTQYNPAFSSEIRVRAASLPVMPISERKIIARRAALELKANSVVNLGIGMPEGIASVANEERIIDLITLTAEPGVIGGIPASGIDFGAAINTQAVIDQPYQFDFYDGGGLDAAFLGLAQVDRAGNLNVSKFGPKLAGAGGFINISQNAKEVVFVGTFGAGKQRIKVNDGKLVILDEAKSRKFVDRVEHVTFSGPFAAARKQRALYVTERCVFELRADGLELTEVAPGIDIERDILRLMDFKPLIPRDPAMMDERIFREGLMDLRERLLTIPLDQRFTLDEQQNLFFVNLERYPLRSKAEIDTIAAIVEARLAPLGRRVYAIVNYDNFSILPELMDDYSAMVRSLVDRFYSGVSRYTTSGFLRIKLGEALEKRGVAPHIFESAEEAQSDWRQVEAGAARQAQR

SEQ ID NO: 14858 - protein, 480 aa, BradyrhizobiumColbertium
MSAPSSSISDPAYLRARAMETLFERLEKLCEGAIAIDRSGRVVYVNEKYLAALGLKQTSEAIGRSIEEVIPNSLMRKVAETGEPILLDIMELGGEQLVVTRMPIEDENGTVIGAIGFVLYDHLESLKPLLARVTQLESDLRLARRQLSSARAARFTFADFVGSTPGIARAKELASRAARQSVTVLLTGETGTGKEMLAQAIHNASSRADKPFVSVNVAAIPDTLIESEFFGTAPGAYTGADRRGREGKFRIADGGTLFLDEIGEMPLQLQAKLLRVLQEREIEPLGSDKITKVDVRVIAATNVDLRKRVSDGAFRADLYYRLNVLSIDLPPLRHCLGDLPDICARLLDDISASGDYVKAKITPSALAALARYDWPGNVRELRNILERALILSDSGRLTGEDVARILPVGAEVRPAAPARSAAAVVPYAEAEAEFEKHTLEQALAASNGQITEAARMLRISRATFYKKLAKFGLASGSAPV

SEQ ID NO: 14859 - protein, 581 aa, BradyrhizobiumColbertium
MTSMNDNSYSGATEAELGFLKEIVRMLPAGLTVQDAQGELLLVNDAAAAQLGIDGSRPLADLAPRREACRQALSAGQAVVTEEALHAGAARQVLLTTHRPVRLAGRELLISASSDITEQKNFEDQLFRSAYFDELTGLPSRRVIEHRANNLLARDRGGERFALAFLDVDNFKHINDYYGHAVGDALLVELSKRLGRDLRDSDMLSRISGDEFLLLLSPIQSQEEVAEFMQSTLERLTAPFFIDNSEIFASTSVGISLYPDHGRSFETLRQNADIAMYRIKNNGKGLAAFFDASMEREAQARMKVEQSLRLAILEKRFCCAFQSKVDIRTQAVKGIEALVRLRDDEGVIQAPGSFINLAGELGLIDELTHLVLAEIVKSIDLINDTFGAEATISINVAAKQAGNPEFMRSFAQALDETGFPQRFMIEVTEDAFVAKNHFQTEILPMFRKLGVGISIDDFGTGYSSLSALADITADEIKIDRSFITDIHKRPRSQGILRAIESLSEALGMTVIAEGLESHEELAYLQAATKIRYAQGYYFSRPIFLEELKLATPASSEARISVASRPVQHNRQGYSRASGYRR

SEQ ID NO: 14860 - protein, 321 aa, BradyrhizobiumColbertium
MGKLIEEFRKGWQGAAPPSLGLSISFAVICLLGATLVRWGLAHVRPDIYFTPYFPAVFFAAALGGFRIGVVTALVGGVLGVVLNFGDAFADRARFALLALYWAVCAMTIWGVEHYRTMLAEQRRISKRLIEEEEYRKLLVDELQHRLKNKLSTVHAVLHQVLHDQPQVWARIDPRLRSLAATDDLISRIDKAGCDIRDLLISELGPYGHVRFTLNGDRLFLPPKLAVTLSLMFHELATNAGKYGAFSSPRGLLQVSWTVSEDRLTITWDETEGPSVDKVSEPGFGTKLLKSALSAFEGRTEISYLKTGLHCIMQCRIPRSG

SEQ ID NO: 14861 - protein, 279 aa, BradyrhizobiumColbertium
MGRLDGKVAVITGATSGIGLRTAEVFVAEGAKIVIAGRRLPEGEALAKQLGANCIFRQTDVTVEAQMQALIAIAVDKFGRIDCLFNNAGGPAQTGGIEGLEAERFDAAMATLVRSVMLGMKHAAPYMKKQGAGSIINNGSIAGRLAGFSSSMVYSAAKAAVIHLTKCVAMELGESNVRVNSISPGAIATGIFGKALGLSTDAAEKTPAVMREVYKTAQPIPRAGLPDDIAHAAVFLASDESSFVNGHDLVVDGAMTGGRNWSQQQQGYVALRKAFDQGA

SEQ ID NO: 14862 - protein, 458 aa, BradyrhizobiumColbertium
MSMQNVAAPAFPFTPPRRNELTHIPGDEGWPIIGKTFQVLADPKGHVEANGAKYGLVYRTHFFGETNVVLLGPEANELVLFDQQKLFSSTHGWNKVLGLLFPRGLMLLDFDEHRLHRKALSVAFKSGPMKSYLGDLDRGISARVAKWKARPGEMQLYPAMKQLTLDLAAASFLGTDIGPEVDEINRAFVDMVAASVSPVRHPLPGTQMARGVKGRKRIVAYFREQIPLRRGNHGGDDLFSQLCRATHEDGALLSEQDIIDHMSFLMMAAHDTLTSSLTSFIGELAANPEWQDKLRAEVLALGLAPDAPSSFDDLEKMPLTEMAFKEALRIKPPVPSMPRRAMRDFTFKGFKVPAGTAVGINPLYTHHMKDIWPEPERFDPLRFTEEAQRNRHRFAFVPFGGGAHMCLGLHFAYMQAKCFARHFLQNMEVSLAPGYKPDWQMWPIPKPRDGLRVSVKPA

SEQ ID NO: 14863 - protein, 411 aa, BradyrhizobiumColbertium
MARLKFGAFLAPHHPIGEHPMLQFRRDLDLVEQLDALGYDEFWCGEHHSSGWEMIASPEMFLAAAGERTKRIKLGTGVVSLPYHHPFNVAQRMVQLDHMTGGRAIFGSGPGALASDAHTLGIDPMTQRDRQDEAIGIIRRLFNGERVTAKSDWFTMNDAALQILPLQEEMPFVVASQISPSGMTLAGKYGIGIISLGSMTTQGLMSLQQQWQFAEDAAKKHGTTVSRADWRVLLTFHIAETREQARKEAGAGLMRWHNEYNVGTLQRPGLTAFSSPDEAVDKTAFVEGAASTIGTPDDLVKTIKNVMQVSGGVGAIIGFVHDWANPENTRRSWDMVARYVVPEINGYIDGLRRSQKFVIENRAIFERAGQAVMAKIMENEKAAEALKVTGPGRVAIPAVNAPDLQKEAAKR

SEQ ID NO: 14864 - protein, 470 aa, BradyrhizobiumColbertium
MHQIVTRQIDSSCRWWVLAIVVAAQFMFGVDAFVVNVAIPTIAIDLHATSAEIESVVAIYLIAYATLVVTGGRLGDIHGTKNLFLAGVLGFTLTSLWCGLAQSGLELIIARLAQGATAALMVPQVLAMLHLLFTDEARNRAFAVYGIVLGLAGAAGFLLGGLLLTVDLAGTGWRSVFFINVPCGLVIAAAAWRIMPSTSRRADTKLDIKGSVVLFAGLLCLIGPLLFGHDVGWAPWLWAMMAIGGLILIAFLKLEQAVARAGGMPLIDLALLADAAFMRGLGAVFFFFFANLSFYLVMTLFMQRGLNIPPLAAGMAFIPLAIAFVAASRHSGVRARHRGTKVLLEGCALQIVGLAALAIVSVHAEQPTALALALTMIIFGYGQGLVMAPLSGAVLSTVKPGAAGSASGMYGTTAQIGNAAGVAAIGAVFFAGEALQSARAGFLVSLALFVTFIMICATFLLWTRRAGARS

SEQ ID NO: 14865 - protein, 394 aa, BradyrhizobiumColbertium
MSLAKNIDLLRRLPRLDGLRFAGPGRSPDSSSPLQEVTDFGDNPGALRMFAFVPAEWQKPRALVVVLHGCGQTAAAYDLGAGWSTLARHYGFALVMPQQQRANNANTCFNWFNPEDTARDSGEPRSIREMIAYMVKAHRIDPKRVFITGLSAGGGMTSVMLATYPEVFAAGAVIAGLPYGIASNLREALDGMFHSPARPARELGDLVRSASDHRGPWPKVSVWHGSADRTVNPGNANEIVKQWLDLHDLSVDAPMAETIVDGYPRQAWWDRDGETLVESYAITDMAHGTPLGLADNDQRYGVEGAFLIEAGISSSYHIAKFFGLTGWIADAAKAEAKPATKPATKPALTSAPHLARSIRTTIAEAPVEPQREKTGGLDIGQIITRALTAAGLMK

SEQ ID NO: 14866 - protein, 222 aa, BradyrhizobiumColbertium
MTEQNDTKAKAGAIIVPVTLFEQNCTIIWDEPSKKAVVIDPGGDVPKILDAIKQTGVTVEKIWLTHGHIDHVGGAAELRDALGVPIEGPHAADKFLLDNVVASGARFGMTGGRDFTPDRWLDEGDSVSIGGLQFDILHCPGHSPGSVVFFNKDLRFAHVGDVLFAGSVGRTDLPGGSHATLINSILTKLLPLGDDVGFICGHGAGSSIGQERMTNPFITGEM

SEQ ID NO: 14867 - protein, 53 aa, BradyrhizobiumColbertium
MSHRPPEICRLARENATATPRFKLQGQLGRPCDICSGRAVRIFCLAARQKSAL

SEQ ID NO: 14868 - protein, 533 aa, BradyrhizobiumColbertium
MAHGNENWWRDGIFYQIYPRSFQDSGGDGVGDLAGILRRLPYVKSLGVDAIWLSPIFPSPMADFGYDISDYIGIEPLFGTMADFDALLAAAHDNGLKLILDLVPNHTSDQHPWFVESRSSRDNPRRDWYIWRDPAQGGGVPNNWLSEFGGSAWQFDETTGQYYYHAFLARQPDLNWRNPDVRAAIYDVMRFWLDKGVDGFRVDVIWHLIKDAEFRDNPPNPHYVEGRPPNERILTQYSTDQPEVHDVIAEMRRVTDSYGARVLIGEIYLPLHRLMAYYGNDLTGAQMPFNFALLSTFWSARSIEKIIEDYEKALPRGAWPNWVLGNHDRPRVASRVGPEQARVAAMLLLTLRGTPTLYYGDEIGMHQLVIAPEDVRDPFEKNVPGIGVGRDGCRTPMQWDSSNFAGFSQVRPWLPLPEDHISENVANLEADSRSILNLYKRLIALRKGCPPLVAGDYHPIAAQGDLLIYRREAEGRAVIVALNLGPEPVSVTTSAMRFGSRILLSTFLDREDERIEGVLDLRGNEGVVVAPPS

SEQ ID NO: 14869 - protein, 174 aa, BradyrhizobiumColbertium
MRADGIGYPASMDNTARNISLVPPPDRRQSETALAVARGTARLLRSLGFSCISELPLPSGRRADLVALNERGEIWIVEIKSSVEDLRADQKWHEYRAHCDRLFFAFTQDLPCEIFPEDTGLIIADAYGAHLHCEAPEHKLAAATRKQMTVRFAMAAALRINRLVDPQGHADFWE

SEQ ID NO: 14870 - protein, 329 aa, BradyrhizobiumColbertium
MVHPTPLLALLCFWTVRAIAVAVIAVAAPGAGRAQQASPPVWTVPEVGALPDDAHGRLVRRGRDLITATYAHIGPEVPDPAKRYAGNNLACSNCHLEAGTKKFGLPIFGLVELFPQYSARLGAEITIEDRVNSCMARSMNGRALPLDSPEMQAFVAYIKFLSSGVPAGKALSGLGTGSMPELDRAADPVRGKAIYANACLSCHNEDGSGIRRSLPSVDLGYMVPPLWGPDSFNDGAGMARLITAANFLHFNMPHGTDYLNPQLTVEQAWDVAAYMISQPRPRKAGLDKDYPDLSKKPVDTPYGPYADGFDQQQHTYGPFGPIRAAHARK

SEQ ID NO: 14871 - protein, 37 aa, BradyrhizobiumColbertium
MDIGSQAEFALQADELPGFAAPGAYAPRSTRLKPVCG

SEQ ID NO: 14872 - protein, 184 aa, BradyrhizobiumColbertium
MNAIAELNEQTDRSLLIVEDDKPFLERLSRAMETRGFSVTSCDTVSDGLAQIGKSAPAFAVVDLRLGDGNGLDVVSALKKKRPDARAIVLTGYGNIATAVTAVKMGAIDYLSKPADADDVVAALLSTNAEKSELPSNPMSADRVRWEHIQRIYEMCNRNVSETARRLNMHRRTLQRILAKRAPR

SEQ ID NO: 14873 - protein, 475 aa, BradyrhizobiumColbertium
MPFFCYCSEERKACNPGWFREPRVCDREGTAALAAMTEIAASDFRHAQRNIRLDTILRLRWLAVLGQLAAIFIVAQGLEFNVEIVPCVSIIFLSAALNLALQTAANPMQRLEPMQAAGLLALNIVELAGLLYFTGGLQNPFSFLFLAPVLISATALPARFTFGLGVLAVACASILFFFHFSLPWDSDDPLVLPPIYLVGVWLSIVLAIGVTSLYSFQVTEEARKLVDALAATELVLTREQHLTQLDGLAAAAAHELGTPLATIFLISRELEKTVKDPSIAADLKTLREQTQRCRDILSKITQLSSTGAPFDRMKLSELIEEVVAPHRDFGVEIKVRIAVTAAAEPVGSRNPAILYGIGNIVENAVDFARTTVEVNAWWNKDHIELVISDDGPGIPPDILNRIGEPYLSRRRTQDDGGSVRRGLGLGVFIARTLLERTGAKVSFTNRTFPDHGAVVQITWPRERFEAIESLEETIG

SEQ ID NO: 14874 - protein, 267 aa, BradyrhizobiumColbertium
MTENDEASSLPTVADRSPPAAIAIDHLVKVYKQTRAVDDISFSLPRGSITGLLGGNGAGKTTTIAMIMGLVLPTSGRVQVLGHPMPEDSASVLGRMNFESPYVDMPMRLTVRQNLTVFGKLYAVKNLSDRIAELAEDLDLTDFIDRANGKLSAGQKTRVALAKALINQPELLLLDEPTASLDPDTADWVRAHLERYRRDNDATILLASHNMLEVERLCDRVIIMKRGRVEDDDTPEAIMARYNRTTLEEVFLDVARGRVNGAKEAAR

SEQ ID NO: 14875 - protein, 272 aa, BradyrhizobiumColbertium
MTDTSLHRGISVHRIGAMILRYWYLLLSSWPRLLELLYWPALQVITWGFLQLYIAENASFFARAGGTLIGAVILWDILFRGQLGFSISFLEEMWARNLGNLMMSPLKPIEFLLSLMAMSLIRLAIGVIPMTLLALFLFHFNVYALGLPLIAFFCNLIFTSWSVGIFVSGLVLRNGLGAESIVWTLMFAILPLACVYYPVSVLPAWLQYVAWALPPTYAFEGMRALLIEHTFRTDLMLEALAINVVLLGASFWAFLALLRSAREHGSLLAGGE

SEQ ID NO: 14876 - protein, 442 aa, BradyrhizobiumColbertium
MPIGEFGGAPPLAAEGSPVLTTPMYWMYEMAHAALNPARAVTDATKLLFQNPLNPWTRTEVGKSVAAACELFERTTRRYGKPEWGLNDTEVNGIRVPVEIRSVWEKPFCKLLYFDRKFARPLRSPQPRVLIVAPMSGHYATLLRGTVEAFLPAHEVYITDWADARMVPLSEGRFDLDDYIDYVIEMLHVLGGNTHVMAVCQPSVPVVAAVSIMEARRDPFVPTSMTLMGGPIDTRRNPTAVNNLAQERGIDWFRNHVITKVPFPHPGMMRDVYPGFLQLNGFISMNLDRHMDAHKQLFANLVKGDGDLVDKHRDFYDEYLAVMDLSAEYYLQTVDTVFVKHSLPKGEMTHRGTLVDPSKVKRVALMTVEGENDDISGLGQTEATHTLCTAIPDHRRVHYVQKGVGHYGVFNGSRFKSEIVPRIHDFMVSAANPSSLQALAAE

SEQ ID NO: 14877 - protein, 198 aa, BradyrhizobiumColbertium
MPPRGTLAEAKDFAQRHGAWIAARLGRLPKAAPFQPGTVIPLRGTPHRIVHRAGQRGTVWTETRDSGERILCVAGGLEHVDRRVSDFLKREARRDLQRSAEAYAAELGVRVKRLSIRDQSSRWGSCTSAGSLSFSWRLILAPPFVLDYLAAHEVAHLVEMNHSARFWRVCGKICPSMERAKKWLDTYGNDLHRYGVED

SEQ ID NO: 14878 - protein, 738 aa, BradyrhizobiumColbertium
MAWGKKKGARKEPLFGLPAALADLRLTPADRIPGGDDKPKKSSKTSAKRKSDDAGNEPPRERKAPAGRSGAKRRTKSRGGFGLGRLVYWGAVLSLWGVIAVIGVVIYVGAHLPPIQSLEIPKRPPTIQIVGMDGSILAQRGEMAGANVALKDLPPYLPKAFIAIEDRRFYSHFGIDPVGILRALVTNVLHRGVSQGGSTLTQQLAKNLFLTQERTMRRKLQEVELAIWLERKHSKNEILELYLNRVYFGSGAYGVEAAAQKYFGKSAKNVTIAEAAMLAGLVKSPSRLAPNRNPEGAEARAQIVLAAMADAQFITDAQAKASIGHPSYNVKPVGAGTVNYVADWIGEVLDDLVGQIDESIKVETTIDPKLQSVAEAAIIDELAAKSVKFNVSQGALVAMTPDGAVRAMVGGRNYSDSQYNRAVTAKRQPGSSFKPFVYLTALEQGLTPDTVRQDAPIEVKGWKPENYTHEYFGAVTLTQALAMSLNTVAIRLGLEVGPKNVVRTAHRLGISSKLEPNASIALGTSEVSMVELVGAYAPFANGGLAVAPHVVTRIRTLSGKLLYMRQPEERNQVIDTRHVGMMNAMMRETLISGTAKKAEIPGWPAAGKTGTSQDYRDAWFIGYTANLVTGVWLGNDDNSPTKKATGGGLPVEVWSRFMKAAHEGVPVAALPSVPGGWGLSNLAHAASQVSPPTPAAPGPAPSSNGGYRPPPPTRANVRPEPAAGLDGWLMDRLFGGNR

SEQ ID NO: 14879 - protein, 141 aa, BradyrhizobiumColbertium
MGHIDPTKEIFAQFRENDRPGPIHMLNLVRLRKEAAYPDGRKASGAEAYAAYGRESGPVFERLGGRIVWQGKFELMLIGPQEERWDHCFIAEYPSVAAFVEMIRDPVYREAVKHRQAAVEDSRLIRHAVLPVGKNFGEIPK

SEQ ID NO: 14880 - protein, 229 aa, BradyrhizobiumColbertium
MLYQNDDMGRDYLAGLKSGLGDKANMIVGEVSYEVTDPTVDSQVVKLKSMGVDLFYDASTPKFAAQAIKKLADLGWTPVHILDINASPVSATLKPAGLDISKGIISTNYGKDPGDPQWKDDPGVKAFFAFMDKYFPEGDKLNTINTYAYSVAELLVQVLKQCGDDLTRENVMKQAANIKGFTPSLALPGIKINTGPNDYRVNKQMQMMKFNGERWELFGPIIEDSGPSG

SEQ ID NO: 14881 - protein, 121 aa, BradyrhizobiumColbertium
MTVTVTDGHGASDTVNLIFNLSEQGPVDLASTTGKDVLFGSGYQDQFVFEANSNHDTILDFAHGQDHIDLTAVVATDIDAAWIAQHVAPSGTDTLITLSATDTILLKGVANVQPSDFIVHA

SEQ ID NO: 14882 - protein, 743 aa, BradyrhizobiumColbertium
MKRLKLLRLWFARKLGFARLMCLALLVLFAGARLWDPPPIQELRLRTFDMFQLIDPRHKAARPVTIVDIDDKSLARLGQWPWPRTRIADMIQNLTSNGAVVIGFDVVFSEPDRLNPDLVASQMRYLDDATRIKLRELPSNDQVLADVIKRSRVVLGETGLPEVLSELDKSLPFTGVATVGEDGAERFLFEFPGLLRNVPIIEKAAAGRGLFSIRTERDGLIRRVPMILRAQGNIMPSLSLEILRVATGTPTLLVRTDKAGIRGVRLKGVEIPTDRNGQLWVHYARRDPSIYVSAADVIDNTVPPAMLAGKLVLVGTSAGGLNDIKTTPVSRAMPGVEIHAQVLESVLSGAVISQPNYAFGVELIAALIIGLLVIIFTPNLGPVRLVLAGATFAAILIGVSWFFYTQYRYLIDFTYPLLSTTAVYLTLIFASFVREQRQRVQIRGMFAQYMSPVLVEQLAQSPEKLVLGGEEREMTIMFSDVRGFTTISESYKHDPQGLIALMNRFLTPLTDVIIERKGYIDKYMGDAIMAFWNAPLDDPQHEVNACEAAIQMLEQIDLVNKEREQEAADGGHVYIPLNVGIGLNTGVGVVGNMGSDLKKNYSVLGDSVNLASRLEGQTKEYGFPIIVGSRTALAAKDKFAILELDFIMVKGKTEPEVIYAIAGREDVMHSGAFQRLRNITIEMLGCYRNRDWQGALDAIERGRRSEDADTLEKLFRLYEARIREFQINPPPENWTGAYALLTK

SEQ ID NO: 14883 - protein, 593 aa, BradyrhizobiumColbertium
MINFDAMVCNAYAKEKLFLQIAPAATSPCGSPEGKTKALPILASRLQVWPELPLQFPLELWAMRLRLSTCLAVLALAFSAVSACAETVVRYGISMADIPLTTGQPDRGAGAYQFTAYTIYDPLVAWEMDVADRPGKLVPGLATEWKVDDADKTKWRFTLRKGVKFHDGSEFNADAVIWNLDKVLNDKAPQFDKRQSAQVKTRLPSVASYAKIDDSTVEITTKAVDSFFPYQMLWFLVSSPAQYEKLGKDWDKFASQPSGTGPFKLTRLVPRELAELTKNPDYRNKKRIPKADKIVLVPMPEALTRTNALLAGQVDLIETPAPDAVPQLKAAGMKLVDNVTPHVWNYHLSVLPGSPWTDIRLRKALNLAIDRDAVVGLMNGLAKPAKGQVDPSSPWFGKPSFELKYDLAAAKRLVEEAGYSKAKPLKTTFIIAQGGTGQMLSLPMNEFLQQSFKEIGIDIDFKVVELETLYTHWRKGAADEMNAGITANNIAYVTSDPLYAIVRFFHSGQIAPVGVNWGGYKNPKVDALIDEAKQTFDSTKQDALLAQAHALIVDDATLVWVVHDTNPHALSPKIKRFVQAQHWFQDLTTIGVE

SEQ ID NO: 14884 - protein, 552 aa, BradyrhizobiumColbertium
MFIKKNTRAALFAVLALTTTAAWPRVASAETVLRIGMTAADIPRTLGQPDQGFEGNRFTGLTMYDALTGWDLSSAEKASVVIPGLATEWKVDDADKTKWVFKLRPGVTFHDGSPFNADAVVWNVEKVLKQDAPQFDASQVGVTASRMPTLASAKKIDDMTVELTTKEPDSFLPINLTNLFMASPAKWQAFYDKADGADAKAKSQAAWTAFAKDASGTGPWKMASFTPRERLELVKNANYWNKDRVPKVDKMVLLPMPEANARTAALLSGQVDWVEAPAPDALPELKQRGFKLYANEQPHVWPWQFSRVEGSPWNDIRVRKAANLCIDREGLRDGLLAGLMVPATGTFEPGHPWRGNPTFQIKYDKAAAQKLMQEAGFGPNKKLTVKTQTSASGSGQMQPLAMNEYLQQALAECYFDVKLDVIEWNTLFTNWRRGAKDPSANGSNATNVTYAAMDPFFALVRFLQSGMAPPVSNNWGFINNPKFDELVKKARQTFDPAARDSALAELHAASVDDAAFLYVAHDVGPRAMSPKVTGVIQPKSWFIDFSPVSIKQ

SEQ ID NO: 14885 - protein, 48 aa, BradyrhizobiumColbertium
MRGCFRGYTISNERESLRGERPLTRLRCREPTLSHKGRGCTEQASTTA

SEQ ID NO: 14886 - protein, 317 aa, BradyrhizobiumColbertium
MLAYIARRIVYVVPIVISVALVCFLLVHITPGDPLVAVLPADASQELAAQLRTAYGFDRPLPVQFGLWLLRALHGDLGNSIATGRPVLAEVMRAVGNTVTLAIAAAIIGFTMGILLGLIAGYFRETWIDKVATSFAIAGVSVPHYWLGMLLVIIFSVQLNWLPAVGAGPSGSNSWAWDWAHLKYLVLPAITTSVIPMGIVTRTVRALTGDILSQDFVEALRAKGLRETGVFRHVIKNAAPTALAVMGLQLGYMLGGSILIETVFSWPGSGFLLNSAIFQRDLPLLQGTILILALFFVFLNLLVDIAQAAIDPRIKRG

SEQ ID NO: 14887 - protein, 300 aa, BradyrhizobiumColbertium
MSELPLSATSDAALQAAPATKARGYWATVGRRIMRDKVSMACALVLLLIFLSAILAPWLGLEDPYKGSMIRRLRHIGTPGYPLGTDELGRDMLARLVYGGRLSLVIGILPVILAFCIGTSLGLVAGYVGGKLNTAIMRTVDVFYAFPSVLLAIAISGALGAGILNSIVSLTVVFVPQITRVAESVTTGVRNMDFVEAARASGAGAFTIMRVHILGNVLGSIFVYATSLISVSMILAAGLSFLGLGTKPPEPEWGLMLNTLRTAIYINPWVAALPGAMIFAVSICFNLLSDGLRSAMDIRN

SEQ ID NO: 14888 - protein, 352 aa, BradyrhizobiumColbertium
MSESTSVEMLEPVEDRGGVAQPLLQVNGLTKHFPVRGGLFAAKRTVRAVDNVSFSVAKGETVGIVGESGCGKSTTARLLMHLMPRDDGDIIYDGMTVGQSLSLRELRRGMQMVFQDSYASLNPRLTIEESIAFGPKVHGMADHAARTLARELLGKVGLRPENFANRYPHEISGGQRQRVNIARALALSPRLVILDEAVSALDKSVEAQVLNLLVDLKREFGLTYLFISHDLNVVRYISDRVLVMYLGEVVELGPVDQVWDQPAHPYTRALLAAMPSSDPDRRTETPPITGDPPNPIDPPSGCRFHTRCPFAEPLCANATPKLTALDRMGHEAACYMAIPGSGHSRAPRGETA

SEQ ID NO: 14889 - protein, 65 aa, BradyrhizobiumColbertium
MTRPTPKEIKPIAQIAGVPVDDEIATRISNAIGPAFEGFAAIAGTLPFDLEPAGYVLAQTQKVSK

SEQ ID NO: 14890 - protein, 471 aa, BradyrhizobiumColbertium
MSTEPALMTLTEVARAIAAKRVSSREATRALLHRIGQWQPHLNAFMSIEAEAALKAADAADAELAKGNVRGPLHGVPLAHKDMYYEAGKVATCGSLIRRDFVPTVTSTALQRLKDAGQVRLGTLHLAEFAYGPTGHNAHYGPVRNPWNVAHITGGSSSGSGSAVAARLTYAALGSDTGGSIRMPAHFCGVTGLKTTVGRVSRAGAMPLSQSLDTVGPLARTAEDCALLLALMAGPDPADSTCSHEPLSDYVAATKGSLKGLKIGVPASFYVDDLDGEVGRVLDETIAVLKREGADIVKVELPDQRQLSSASQLVLAVEAAAFHKRWMIERPQDYGPQVLMRLQNGLAVPAITYLEAMRWRGPALAAHNAATAGVDAVIAPASPVPAPTIEESDVGGGPNAPALLQRLTLFTRPVNFLGLPSLTVPSGFTKTGLPVGMQLIGRSFDEATLLTIGAAFQRVTDHHDRLPKLPS

SEQ ID NO: 14891 - protein, 325 aa, BradyrhizobiumColbertium
MTKLVEISGLNIRFTGERTVYAVNDLSLSLGNSEVLGLLGESGSGKSVTLRALMRLLPKKRTQISGTVNVLGQDVLAMNDEQLSSFRGQTVSMIFQEPALALDPVYTIGAQIAESVVRHEGKSFAEGRARALEMLEVVRIPSAKRRLDAYPHEMSGGMRQRAMIALALACRPKILLADEPTTALDATVQIQILLLLRELQREFGMSVIFVTHDIGVAIEICDRVAVMYAGQIVEQGTLRDIVRAPVHPYAKGLLASTIHGAKRGERLETIPGTPPSLAERPHNCSFAPRCKFVEPRCLEQLPANVEVGPGWAARCVLAEPAVASS

SEQ ID NO: 14892 - protein, 89 aa, BradyrhizobiumColbertium
MHISNEGLLVILFVGLVAGWLAGKVVRGAGFGIIGDIVIGICGALVASLLFPRLGIRLGTGLVSEIVYSAIGAVILLVVVRLVRGGGRL

SEQ ID NO: 14893 - protein, 582 aa, BradyrhizobiumColbertium
MAAIPGVRRSELGDALRACRTAFIGVGLMSCMINLLYLTGSIFMLEVYDRVLPSRSIPTLVGLIILASFLYMAQGMLDMIRNRILGRIGTSLDEALNKRVFDTIVRLPLIVGNRNEGLQPLRDLDNVRSFLGGMGPSAFFDLPWLPLYLAICFAFHVLIGVTALVGAIILVGLTLVTEFMSRQPAKEAMGLAAQRNDLAQASRRNAEVMVSMGMAGRMNQRWSEANEKYLAGNQRASDVAGGLGAVAKVLRMMLQSAVLAVGAYLVIHQEATAGIIIAGSILSARALAPVDLAIAHWKSFVAARQSWHRLTRLLEQMPAQPMPTQLQPPTSRLSVEGIAMVPPGDQRLVVQDVTFALAAGNGLGVIGPSGSGKSSLIRALVGVWQPVRGKVRLDGAALDQWSSDMLGRHIGYLPQDVELFGGTIAQNISRFDPEATSDGIIAAAKEAGVHEMIIKMREGYNTQVGEQGAALSAGQAQRVALARALYGNPFLIVLDEPNSNLDTEGDEALTRAIRSARERGAIVVVVAHRPIGVEAVDQILVLRDGRMQAFGPKEQVLAQVLQPRATPPAPIKIVSEGGVAKP

SEQ ID NO: 14894 - protein, 444 aa, BradyrhizobiumColbertium
MSTLAIGGPKPAAAKTVRDSIKFHLMLGLAIVLVLVVGLGGWASTVLISGALIAPGQIVVESNVKKVQHPTGGVVGEVRARDGDRVKAGDIVVRLDDTVTKANLAIVTKNLDAAQARAARLQAEQRGLDRIEFPQVLLDRAGDPDVKVLLSAETKLFDVRVNGRTGQKAQLRERITQLNEEIAGLSAQEKAKDQEISLVQNELTGVRELYEKRLVQISRLTQLERDSARLNGERAQYIAARAQAKGKITETELQIIQIDKDVVSEVSKDLRETNDKIGELIERKVAAEDQLRRVDIRAPQDGMVLQSTVHTVGGVVTAGDTLMLIVPQTDDLQVEAKVNPVDIDKLQIGQKTLLRLSAFNQRTTPELNGLVSRVSPDVTTDQRTGQSYYTIRVSMPPEEIARLGDVKMIPGMPVEAFVQTGDRTMLSYLMKPLHDQLMRAFREK

SEQ ID NO: 14895 - protein, 489 aa, BradyrhizobiumColbertium
MQSPSSIATESFTDASLAVARLEEIYERNTKFLRDRFEAYVGGEAITTRVRAFYPFVRITTATHARLDSRLAYGFVAGPGVHETSVTRPDLFRSYLTEQIGLLIQNHGVPVEIGESAEPIPIHFAYRRDINIEAAITTSENSAVTRSLRDAFDVPVLATMDDSIADGTFELQPGAPEPLSLFRAARVDYSLRRLYHYTGTDPEYFQNFVIFTNYQFYVDAFAELCQQRLQSGEAGLDAFVAPGNVVTRSGGASSGTAPARAPQMPAFHLTTPGYRGITLINIGTGPSNARNVTDHVAVLRPHAWLMLGHCAGLRNTQRLGDYVLAHGYVREDHVLDRELPLGVPIPALAEMQVALEQAVEDVTGLEGFELKRLMRTGTVASVDNRNWEISGPDVIRRLSQSRAVALDMESAAIAANGYRFRVPYGTLLCVSDKPLHGEIKLAGMASEFYRRRVGQHLEIGLKALERLKQQESERLHSRKLRSFAEVAFQ

SEQ ID NO: 14896 - protein, 91 aa, BradyrhizobiumColbertium
MPLTRDRIIGHDRERLAFRFTMLSDGEVVQCQISDAAMDELAGMQGTESSARQAQFLSLRETIERIASDLYDEAPRVKGHVVRIFTRHLGR

SEQ ID NO: 14897 - protein, 160 aa, BradyrhizobiumColbertium
MKELVGIAEKVAAQLIARKQTIAVAESSTGGLISASLLAVPGASAYFLGGAVVYTRDARRMLMDISDDGMKGFRSSSAPYAQLLAEQMRTRFNSDWGLSETGAAGPTGNRYGDAAGHSCMAVAGPASEVMTLETGSNDRLANMQAFAATALNLLLRKLEA

SEQ ID NO: 14898 - protein, 352 aa, BradyrhizobiumColbertium
MTSPIAGGVDCDVHPALPHLTSLLPYLNDYWRDQVTTRGMVDLVSQSYPQNSPITARPDWRPETGKPAESLSDMQRHVLDPFKLKHAICNPLYGVQMVFSEDMQAAFCRALNDWLAKEWLDRDPRLRGSIVIPTQSVEKAVAEIERCAQDKRFIQVLMLVMGDMPLGKRVLWPIYEAAERLELPVGIHAGSAYHNPPTAVGWGSYHIEDYVGQAQAFQAQLTSLIVEGVFAKYPRLKMVMLESGVSWIAPYLWRLHKFWRGVRMETPWVDRAPLEIVRSNIRFSLQPFDAPPEPETLIRLFEHMQSDELVLFSTDYPHWQFDDQDALPEGLSPDLVRKIMIDNPHATYPRLT

SEQ ID NO: 14899 - protein, 369 aa, BradyrhizobiumColbertium
MNIQFRESQEAESPLTVKPAIADCDIHPARASRTELYPYLAKRWQHHLEVYGVHAYQGMMEGPPYPKAQPNASRRDAWPPEGGPQGSSLSFMQKQLLDPNNVQLGVLNPLNTGQGIRNHELSAALCSAINDWQIDKWTSKDKRLKASIVVGNEDGLSAAAEIRERAGDKNFVQVLLLSRNVEPLGQRRYWPIYQAAEEAGLPVGVHAFGFGGNPITPSGWPSYYIEEMVGHSQCQQSALASLVLEGVFERFPKLKMVMIEAGFGWAPSLCWRLDKVWQRLRSEVPHVKRPPSEYIREQVWWTTQPMEDPERREDLFDVIKWIGWDRLLFATDYPHWDYDEPSRVLPAGVSETNREAFYLGNAKKLYGVS

SEQ ID NO: 14900 - protein, 137 aa, BradyrhizobiumColbertium
MARHVIAPVDELPPGTRKFLEIDGRPIAIFNIKGEYFGLMNRCPHQGAALCEGPLIGLAQSSNPGEIEYTKLGEIIRCPWHGWEFDIRTGQSYCDPRRFRVKAYPAHVEPGASVVKGPYIAETIPVSVESDYVVVEL

SEQ ID NO: 14901 - protein, 295 aa, BradyrhizobiumColbertium
MPSLNGLRAFEAAARHLSFTLAASELNVTQTAISHQIRRLEEELGIRLFVRQNRALALTPEARDYLPGVRAAFNDLRLATDRLLRRDDDKVLTVSTLASLAAKWLLPRLADFQEQHPGIDVRITTSTSLVDFQRDNVDAAIRYGRGQWAGLRADWLMADELFPVCSPSLLRGDKPLRRPEDLRNHALLHTSNANSDDWRLWLTAAGLPSDIARQPGITFDMIFMTIQAAIDGIGVAMGRTSYVQDDIAKGRLVVPFKIALPADAGFYLVAPEGRREAPKLAAFRQWLLAATQNKA

SEQ ID NO: 14902 - protein, 67 aa, BradyrhizobiumColbertium
MSILTQNSMTNHHAAGLLQQIGEILHVWHERYRTRRELTNWTARDLHDVGLSWSDIAYEADKPFWRA

SEQ ID NO: 14903 - protein, 207 aa, BradyrhizobiumColbertium
MSTLRLEDLQQYSETLRTRLGEVMNVRFVEPRDRDEIQHYFRSLSTRSRYNRFFGAISELPKGLLQEFLEVGERDRFTIVATMMVDGFDTIVAEARYALNVGTATLEFGLSVDDRWQGHGIATALMNNLECRAAALRAEHMFGDTLRSNEAMVSLARKSGFGFVNHPDDWKLVRFEKEISVSPEDIPCANWRLAALSRQADSPSASA

SEQ ID NO: 14904 - protein, 41 aa, BradyrhizobiumColbertium
MRSIEPGMTLERETTKAKKARLWDDQAGPQSCQAEAEGLSA

SEQ ID NO: 14905 - protein, 276 aa, BradyrhizobiumColbertium
MTTETTIDTGTHELLCVIRDRVAIITLNRPEARNSLSDALTPALRTMIRACGENPAVGALLLTGAGEAFCAGGNVKGMGAHRDKAKLDMSFDDRVADLQERQRLLTGALVSVRKPTIAALPGPAVGAGLAIAMACDIRIAALSAFVATGYARIALSGDYGIAWLLTRLVGTARARELMFTGDRVDAARAEAIGLVNRVVPDDKLQTEAFALAKSLAEGPRLALRYMKDNLDEALLFDFETARDHEAERLVRLTTTADHKEAVQAFIEKRKAVFTGK

SEQ ID NO: 14906 - protein, 233 aa, BradyrhizobiumColbertium
MEHPTYKIALIVGVGEGLSASLARLLSAQNIRVALAARKIEKLGALCAETGAKAYACNATDPEEVERLFGLVEREIGTPDLVVYNASGRTRGPLVDLIPADVAQAIAVSAYGGFLVAQQAAKRMLPNKHGAILFTGASASVKGYAQSAPFAMGKFALRGLAQSMARELSPLGIHVAHFVVDGGIRSAARSEPADKPDSMLDPDAIAQSYWNVLQQPRSAWSWELELRPWVEKF

SEQ ID NO: 14907 - protein, 43 aa, BradyrhizobiumColbertium
MGRAITVPQSELLLRGDHAALTICGFIAIRAWSMIDIIERGKP

SEQ ID NO: 14908 - protein, 594 aa, BradyrhizobiumColbertium
MHKPVTAQPQDIAAAPSGLLAPDTSGMNFYRADPALTDLLRIHLPDHLFRHIEPHLDRLGELAGGRLDECARLADRHTPILHQRDKFGRDVQWIEYHPAYRELENAAFGEFGIHALSIRKGIMGWPDKYPVVAKHAFTFLFNQTEFGMGCPINVTDGCAKLLANFGSDALKAKYLDGLTSTDMSKLTQGGQFMTEKEGGSDVGTLTTRAVQEGDHWRLYGEKWFCSNADAKVVMLLARPEGAGPGTRGVGLFLMPRFLDDGTQNHYRIVRLKDKLGTRSMASGEIKLEGAIAHAVGKLDRGFVQMAEMVNSSRLSNGVKSAALMRRAYHDAMTVAKNRVVFGQRIIDLPLGRRQMLKIMLPVEQALSMSFLTADALDRAEAGSQDAAALLRILTPTLKFRATRDARKVCGDALEMRGGIGYIEEFATARLLRDAHLGSVWEGTGNIVAIDALRRAVGRHGAESALSADLHARLDDSPSVPQAWRDRLRGLVDRAVGFAREVAGKAENEADARRATSVLYHVASAVAFAWEAHRIHAMRGDARRLLLSRLVIDHRVLPSDPFRLAENTAQAQIAALLLGDSAAGMSEVGELVLAA

SEQ ID NO: 14909 - protein, 362 aa, BradyrhizobiumColbertium
MKAAVLYEVNQPLVIEDISLPKPGPREVLIRTAVAGLCHSDLHFMEGLYPHPLPAVLGHESAGVVEQVGSDVTYVKPGDHVVTCLSVFCGTCDNCTTGRTVLCTDTTVKMLPGASNRMQWSKPEKLHQFLNLSSFAEQMLVHENAIVKIRKEMPLDLAALIGCGVITGYGAVVNTAKVTAGETVAVIGCGGVGMAAINGAQIAGAGRIIAIDTNPAKLQLATKLGATDIINPADGDVVKQVRDLTNGGVHHSFEVLGRKETAEQAFAMLASGGTATIVGMIPFGQKIELHGFDFLRERRIQGSSMGSNHFRVDMPRLVDFYLRGRLHLEDWISAKLKLSEINEGFANMKAGKTLRSVIVFDN

SEQ ID NO: 14910 - protein, 490 aa, BradyrhizobiumColbertium
MAKSEWSFKSAVELSAALTAKKVSAVELTRDAIERIERHDGRINAICVRDFDRALEAARAADAALARGERKPLLGLPMTVKESYNVAGLPTTWGIPAQKDFIAKEDALPVTRVKDAGSIVIGKTNVPLGLGDWQSYNDIYGTTNNPYDLGRTPGGSSGGSSAALAAGYGPLSIGSDIGGSLRVPAFHCGIYAHKPTFNLVAMRGHTPPPLPPLPFERDLSVIGPMARSAVDLSLVLDVMAGPDPLDAGIAYRLELPPARHTAFRDFRVLVIDTDPVMPTDAVVRGSINALADKLAKAGVKIGRSSPLLPDFAASSRLYMRMLMSFLGATFAPDIYAGARAAAAALPESDNSLAAERLRGIALSHRDWQAANGGRTRLRAQWRELFKSFDAVICPVMPTPAFPHDHAPDQEQRRISIDGTAHVYTDQLAWPGIATLPGLPSTAIPTGFAPDGLPVGVQIVGPWLEDRTPLKLAELIEREFGGFKPPRMFDD

SEQ ID NO: 14911 - protein, 323 aa, BradyrhizobiumColbertium
MKTFADLTEREVLAVAISSEEEDSRIYMTFAEDLKERYPDSAKLFEQMAEEERGHRHMLLELYEQRFGQHLPPIRREDVKGFLRRRPIWLTKNLPLDTIRKEVETMELEAERFYAKAAEQAEDVNVRRLLGDLAEAEKNHEHTAARLTDEILKPDVRAEEDRTRRRMFVLQYVQPGLAGLMDGSVSTLAPLFAAAFATHQNWQTFLVGLAASIGAGISMGFAEALSDDGSLTGRGSPWLRGITCGAMTTLGGLGHTAPYLVPDSWANAFWIATAIACVVVFFELWAIAFIRSRYMDTPFLQAVFQIVLGGAIVLAVGIVIGAA

SEQ ID NO: 14912 - protein, 382 aa, BradyrhizobiumColbertium
MTALPDIPLPAGIRSRYVDGINGLRVHVLEAGFETKGRPCVLLLHGFPELAFSWRKVMPALAAAGYHVIAPDQRGYGRTTGWSADYDGDLAPFSLLNLVRDAVALVSAFGYRQVDVVGHDFGSPVAAWCALIRPDVFRSVTMMSAPFGGPPPLPFGTVDAPATPAIEDPVHRDLAALPRPRKHYQWYYSTREANADMQQAPQGVHDFLRAYYHHKSADWADNKPYPLQSWSAQELAKLPTYYVMDQKETMAETVAKEMPSPAAIAANQWLPEGELAYYSAEYCRTGFQGGLQWYRYGTSGTLNNEMQLFAGRSIDVPSCFIAGKQDWGTYQRPGVFETMQARACTKMLGCHLVDGAGHWVQQEQPAEVSRLLLDFLARAGTA

SEQ ID NO: 14913 - protein, 289 aa, BradyrhizobiumColbertium
MSLKFSVGDLTIHRVIEQETSFVPALEMLPGLTAEVLAENRGWMREARALDEQDVLLLCFQSYVVKTPHHTILIDSCIGNDKPRPQRPKWNMKTDDAYLRALGAAGFTVDDIDFVMCTHLHVDHVGWNTRLLNGRWVPTFPKARYVFARQEFDHWSAQNAKTEIPPFVDSVLPVVEAGRHELVGNDHQIGDHVRILPTPGHTPGHIAITMGRSKDDAVFSGDLMHSPLQTLHPELSIKFDVDPAAAAKTRRSFLERYCDTDTLCCTAHFPSPSVGKIRRKGNGFVCAAV

SEQ ID NO: 14914 - protein, 203 aa, BradyrhizobiumColbertium
MKLTFSPASPFARKVRIAAIELGLIDKIEFVPAAVTPGTANEDYSRITPLKKLPVLITNDGDVILDSYVIVEYLNEMAGGSLIPDYGPRRWKAKTNHSLINGMLDSMLLCRYEKMVRPQGLQWQAWSDDHWNRAWTGMARFENMPEVLNGPFDISQIGLVCVLGYADFRFADCGWRKAYPKLDAFHQKMLERPSVKISVPPAA

SEQ ID NO: 14915 - protein, 38 aa, BradyrhizobiumColbertium
MESIPQLNVLLRHCEERSDEAIQSVAAEGFWIASLRSQ

SEQ ID NO: 14916 - protein, 280 aa, BradyrhizobiumColbertium
MKLVRYGEKGAEKPGLIDKSGQLRDLSAHVKDLTGEAYSPESLKKLAALDPASLPAVSGKPRFGAPVTGISKFVAIGLNYSDHAKETGAEIPSEPIIFMKANTSLSGPNDPVEKPRGSTKLDWEVEIAAIIGTRAKYVSEADALNHVAGYCVCNDVSERAFQIERLGQWTKGKSHDTFGPLGPWLATKDEIKDVQNLSMWLDVNGQRRQTGSTKTMIFSMAKCISYVSQFMTLLPGDIVTTGTPPGVGLGMKPPTFLNVGDVVTLGIEGLGEQRQEIIAA

SEQ ID NO: 14917 - protein, 282 aa, BradyrhizobiumColbertium
MQWKVGRVKITKVVELETVGSTRFILPLATNEEICKLPWLTPHFATEEGRLKMSIHSLVVETPGKRIVVDTGLGNDKQGRNVPTWNNRSTPFLETMTVAGFPPDSIDTVLCTHLHVDHVGWNTKLSGGKWVPTFPKARYVFGKSEYEHWRDHSTEPDKQAVFADSVQPIVDAGKADLVSSDHRLCDEISMIPTAGHSPGHMSILIQSDGEQALLTGDVAHHPCQMAHLDWSSTADSDQAQSAATRAALFGRFADTPTLVIGGHFSAGHIRREGEAFRFVALG

SEQ ID NO: 14918 - protein, 179 aa, BradyrhizobiumColbertium
MDHLTRCGVIAGTEEDAEERAMPELTISAEKVAFIIEKAREFDVKEGESDPDSGSNPSDDDALDVLEDDGSDPVVNELGSFMIALNEDEQVDLVALTWLGRGDGTIDDWDDLRARAVEARGEYRSPRRETVHYLLGDPMLGDLLANGLEEFGIDWTGERTTADSSGPSQQDEDEPTKQR

SEQ ID NO: 14919 - protein, 260 aa, BradyrhizobiumColbertium
MDLGIKGRRAIVCASSKGLGRACAFSLAEAGVHVTLTARGAEALKKTADEIRKAYPEVTVTEIVGDITTPAGREAVLKACPEPDILINNAGGPPPGDFRNWTRDDWIKAIDANMLTPIELIKSTVDGMMDRKFGRIVNITSAAVKAPIDILGLSNGARAGLTGFIAGLSRKTVINNVTINGLLPGPFETDRLTTTAKGEADKRGVTPQQILAERAKLNPAGRFGQPDEFGYACAFLCGAKAGFITGQNILLDGGAFPGTL

SEQ ID NO: 14920 - protein, 170 aa, BradyrhizobiumColbertium
MNSFDLAVYAALAVAVGFGFRTGLLRSAMTILAYLIAAPIAVALMPLIAPQIAGNPNSPMLQNWIWFFGIFVIVGMLFGHIGRVALNDTIGEAGIGDRLGGAALGAIRVGLVATTLVLVFDQIVPANRQPPFLAGSHLRPMFSAAGQMGFKSLPPEAAAAIDRLKQERRI

SEQ ID NO: 14921 - protein, 253 aa, BradyrhizobiumColbertium
MSDLFDVSQETILVTGASQGLGRQFARVLAAHGAAVALAARQTEKLKSLEEEIRGKGGRAVAVALDVTDTGSIAKAVDAVEAALGPVTVLINNAGIAIEKLATEQTEADWDAVIGANLKGAYFLATEVARRMIARKQPGNIVNIASVLGTGVLKAVSPYAISKAGIIQATKAMALELAGQNIRINALAPGYIDTEMNHAFWSTPAGERLAKRIPQRRVGAESDLDGAILLLASRASRYMTGSVVTVDGGFLLN

SEQ ID NO: 14922 - protein, 530 aa, BradyrhizobiumColbertium
MTDTFDFVVVGAGSGGCTVAGRLSEDAGTSVALLDAGGRNDTWRITTPFGLALPYSAANWAFDTVPQKGLNGRIGYQPRGKGLGGSSAVNAMVYIRGNKWDYDHWAALGNAGWSYADVLPYFKRSENNADFDGEYHGKGGPLHVNKLRSDNPIHDVFHQAAREAQFRIREDFNAEDHEGLGSYQVTQHNGERWSAARAYLDPHVAKRTNLRVETGAHATKILFEGSRAVGVEYLQGKQTKQLRARREVILAAGAFQSPQLLMLSGVGDGDALRAHGIGLVHHLPGVGRNLQDHPDFVFVYASDYPHFVHASLGRLPSLLRAIQRYRRERRGLMTTNFAECGGFLKTRPDLDIPDIQLHFVIAMLDDHGRKKHKEAGFSCHVCLLRPKSRGSVWLKSADPLAAPMIDPNFLGEEEDVEAMVAGFKTTRRLMETPALRALQKKDMFTSDVRTDDDIRAILRARVDTVYHPVGTCRMGADAMAVVDPALKVRGVEGLRVVDASIMPTLIGGNTNAPTIMIGEKAADMIREEMR

SEQ ID NO: 14923 - protein, 477 aa, BradyrhizobiumColbertium
MDKSLTSAPLRALEEAFHTMVARSRDEPAPGLAERLDRLARLRAVVADNEERFRQAISADFGHRCAVETTIAETMLVFSEIRHATKHLKAWMTPQRVATALQFLPARNRLMPQPLGVVGIIAPWNYPLQLTLAPAIGAIAAGNRVMIKPSELVPHFSALLKETVARRFDATELLVTGIEDEIAKAFASLPFDHLVFTGSTRVGRLVAEAAGRNLTPVTLELGGKSPAIIDASADLDEAAERIAYGKLLNAGQTCIAPDYVLVPESSVQAFAEKVRAQMRRMFGADPANKDYTSIISDRHYTRLEGLVADAAQRGAKILQPAKPDDPNWKAHRKFPPTLIIGATEAMAVMQEEIFGPVLPVLGARDPAEAIAFVNRRDRPLALYWFGKDASARDEVLARTVSGGVTINDCLFHFTQVNQPMGGVGASGTGAYHGEWGFKTFSKLKPVFYRSKFNRLADLYPPYGGKIAGLEKLMRFMS

SEQ ID NO: 14924 - protein, 372 aa, BradyrhizobiumColbertium
MTMRFDNVFQLGVKELRGLVRDPMLLVLIFYSFTLAIYAGAKALPETLNRAAIAIVDEDRSPVSSRIELAFTPPYFSEPRLISQYEMDRRMDAGLDTFALNIPPEFQRDLLARKSPAIQLNIDATRISQAFNGGGYIEQIVNAEIAEFLARARNAQTAPIELALRARFNPELKKSWFGAVDELITSITMLSIILTGAALIREREHGTIEHLLVMPVTPLEIMVSKVWSMGLVVLAASALSIVFVVKGWLAVAIDGSVALFLLGAALQLFATTSMGIFLATVAGSMPQFGLLLMMTLLPLQTLSGSMTPRESMPQFVQDIMLAAPNTHFVMLAQAILFRGAGLESVWPQLLALAVIGSVFFVIALRRFRAFLT

SEQ ID NO: 14925 - protein, 924 aa, BradyrhizobiumColbertium
MTTTAAAEAPAAAGRVVHLDGVGLSYGKSRALESITLDLPSGCMVGIIGPDGVGKSSLLALIAGARAIQEGRIHVLGGDMASARHRRTVCPEIAYMPQGLGKNLYPTLSVFENIDFFGRLFGHGRAERHRRIAGLLRDTGLTPFSDRPAEKLSGGMKQKVGLCCALIHDPELLILDEPTTGVDPLSRRQFWELISAIRNSRPGMSVIVSTAYMEEAAQFDFLIAMNAGRVLATGTPAELKRQTGADTLDQAFIRLLPEADRGNHSDVVIPPRGPDHDEIAIEADHLTRRFNSFVAVDDVSFRIRKGEIFGFLGSNGCGKTTTMKMLTGLLPVSEGTARLFGKTIDAGDMSVRRRIGYMSQGFSLYSELTVAQNLDLHARLFELPADTITARIDEMIARFDLADIADALPDALPLGLRQRLSLAVAMIHAPDILILDEPTSGVDPVARDRFWQILAELSRKDNVTIFVSTHFMNEAERCDRVSLMHAGKVLTSDSPAAIVAAHGTETLEQAFIACLEGAIADTAEPAGQQAAAPPPPPPAVAAPPRRRNAAFNPTRMLAYSRRETLELRRDPIRATLAILGSVLLLFVLGYGISMDVENLTFAVLDRDDTAISRDYSLQIAGSRYFTQKAPIADYADLDRRMRAGEIGLAIELPPGFGRDVSRGRHVEIGAWVDGANPTRAETLRSYAQAIHATWLAQKGRELYGEAAVAGAYQLQLRYRYNPDVISVVAMAPGIIPLLLVLIPAVLAALAVVREKELGSIVNFYVTPVTRLEFLLGTQLPYIVLAFANFLLLVGFALTVFGVPFTGSFSTYALAALLYVTATTGMGLVISAFMNSQIAALFGTVLITLIPAIQYSGLIDPVSSLQGLGAAIGQLYPTTYFVTISRGTFSKGLGFDTLHNDLLALAVMVPILVIAGAMLLKKQAR

SEQ ID NO: 14926 - protein, 355 aa, BradyrhizobiumColbertium
MNFRPGRVVAVLAFLLAAGGYYYWQHRDADALPPGFARGNGRIEAVEIDIATKTPGRIREILVNEGDFVTAGQVLARMDTEQLQAQRRQAEAQLQRATINVETAKSLVNQREAERRAAEAVVDQRIAQLDTTSRKLDRSEQLIKSNAVSQQVLDDDRSANATAKAALAAAQAQVAASEAAISSSRAMVIDAGAAVDAAKAAIESINADLDDSVLKAPRDGRVQYRVSQPGEVLAAGGRVLNMVDLGDVYMTFFLPTAAAGRVAIGAEVRLVLDAIPQYVIPAKATFVADVAQFTPKTVETEEERQKLMFRIKAHIAPDLLRQHIEHVKTGLPGMAYVRLDPGAQWPDNLKIRLTR

SEQ ID NO: 14927 - protein, 401 aa, BradyrhizobiumColbertium
MCRIIMRAALAAALTAVAISPSFAQQAPLKIGVLADFSSVYSDIGGMGNVEATKMAIEDFGGQMFGKAIEMVSADVLNKPDVASTIARKWWETEGVDMIIDLPTSATALAVMELSKQYEKIMIVTDAASSDITGKSCSPYTAHWTYDTYANAHTVGSAIVKNGGDTWFFLTADYVFGHSVERDTGDVVKASGGKVLGSVKHPLNTADFSSFLLQAQASKAKIIGLANGGGDTINAIKQAGEFGIVAGGQNLAAIVMFISDVHSLGLKLAQGLIVTEAYYWDLNDKTRAFGKRFMERVKRMPTMNQAATYSATLHYLKAVQAAGTRDTKTVMAKMRELPVKDAFTEHGVLREDGRMVHSMFLFQVKKPEESKGPWDYYKLLAEVPADQAFRPLKDGGCPLVK

SEQ ID NO: 14928 - protein, 38 aa, BradyrhizobiumColbertium
MRNGATSPAELTRPIVPTTFRASIGSSRLQWPSHCCRR

SEQ ID NO: 14929 - protein, 537 aa, BradyrhizobiumColbertium
MTGDTAATISKAREHSIGDLLRRSAGREPNKLAVSCGDVSWTFAEMDAICNRLGRGLLGLGVKKGDRVAVLSRNSHAFAALRFALARIGAVLVPINFMLNPDEINFILKSSGAKLLATGPDFVEPARAASAKDCAVEKMIWLPGEDPAAAPAGLTTFADLLDPDGSFLDASVDSRDLAQIVYTSGTESLPKGAMLTHEAVMWQYVSCIIDGGMNAEDKFLHALPLYHCAQLDVFLGPQIYLGASGVITGKPTADNILALIQAHKITSFFAPPTIWIAMLRSPNFDKSDLSTLQKGYYGASIMPVEVLLELQRRLPNVKFWNFYGQTEIAPLATVLRPEDQLRKAGSAGKPGLNVETRVVNTAMEDVKVGEVGEIVHRSPHLLSGYYNDPVKTAAAFSGGWFHSGDLATIDEEGHITVVDRVKDMIKTGGENVASREVEEMVYRIPEVSEVAVVGLPDPRWIEAVTAIVVVKSGETLDEDAVIKHCAAQMAHFKVPKRVIFVDSLPKNPSGKLLKRELRQRFVGGETLDKAVQTSFGT

SEQ ID NO: 14930 - protein, 335 aa, BradyrhizobiumColbertium
MKAWQIASDWSIEGMELADLPEPAPGSGQVAVRMKAASLNYRDLLTVQGKGSVTRLPLIPFSDGAGEVVAVGEGVTRVAVGDRVCPMFFQSWIDGRVSATSRRYALGGTRPGVLQEVMVLDAEGVSHIPSHLSFKEAATLPCAGLTAWRALFEEANVKPGDTVLVQGTGGVSIFALQFAKLAGAAVIVTSSSDEKLERSRALGADHTINYRSVPEWGKAAAAWTGGGVDHIVEVGGKDTFSQSLEAARVGGTILVIGILTGVSQQIAISSLFAKNLHVIGLSVGSRRMFEAMTAAIGRNSAKPVIDRAFSFDTVPDALRLMQQGGHFGKIVVEFA

SEQ ID NO: 14931 - protein, 229 aa, BradyrhizobiumColbertium
MGQRPLEIAAGDITIGDPSIKGARVTQIEHGNFQTALLPRKALLRVCPNAEDLIAQSIPGASPIASMFLRYYDLAHAYARELAPAELDAVSQHLFDLSVLMIGARGDVAEEARTRGLAAARLETLKADILAQLDSPALSLSVLSAAHRVSPRTIQLLFEQAGITYSGFVLEQRLLRAERLLRNPAMRTCKIIEIAHLAGFHDVSYFHRVFRRRFRQTPDDVRKLAGDAG

SEQ ID NO: 14932 - protein, 283 aa, BradyrhizobiumColbertium
MTRRVRNLLPVLLALGLGAVCAADASAADLALKAPPAPPPAAFSWTGFYAGVHAGYGSGEGNAASVDPGALLALFPGVNNLTSTASAPFTFGVDRSGWLGGLQAGYNWQTGHFVAGVEADVSAAGIGARESSSYALRPVFLVGDFDNYTGTVTVTQNVDYLGTLRGRLGYASHNWLFYATGGLAWAHVKASLDSTHVRLTNNFPMPGLPGALDGHASASGYKIGYAVGGGGEWAFTPHWSLKAEYLYLNLGRQLSLSIPGTSLMPSDIELHTFRIGLNRQFAP

SEQ ID NO: 14933 - protein, 399 aa, BradyrhizobiumColbertium
MTSRPSSSRIWPLFALNFFMADMQSGIGPFVGVFLQERGWATGLIGTAMTIGNVAGMLVTTPIGGFIDSSRNKRMWVVIPGICVVSASAIILISQNFWAVTFSQVAQSLASAAIVPAVTGITLGIAKQKGFNELNGRNQAYNHAGNMVGAALSGYLGYKFGYVAVFALAAVFGAIAIACVMMIPAKTIDDRAARGSKEDDPDSAPDAFTMLLKHRALLVLALSLALFHLGNAAIVPLYGLAAVAEGQANGPSFVATTVVIAQGVMIVTSLIAMKAASRRNYWPIILLSFMFLPIRGVLAFFVTGWWGVVPMQVLDGIGTGLQTVAVPGMVARALNGTGRINLGQGAVITVQGVGASLSPALGGWIAQWIGYGPTFLLLGGFGLASMALWLAFGAAVKKY

SEQ ID NO: 14934 - protein, 203 aa, BradyrhizobiumColbertium
MEPSFAIGQRALLVPQNDGCVMWDCIPLETDDAIRYVAALGGLKAIAISHPHYYGAVADWSDTFGGVPVYLHADDRAFVTRPHPAIVHWTGDHHRISDDVLLLRTGGHFAGATVLHYAHGADGKGALLTGDIAQVTMDRRFVSFMYSYPNYMPLNAAAVRRVAAAVEPLAFDRIYGAWWGRNIAGGAKAAFAASVARYLAAIA

SEQ ID NO: 14935 - protein, 338 aa, BradyrhizobiumColbertium
MTAQRDYEIFDAGHVALRSGTVFPSLKLAYKTYGTLSPARDNVILYPTSFSAQHTDTEWLIGPDRVLDPTRYFIIIPNLFGNGLSSSPSNTPATFPEVTYHDAIAVQHRLLTESFGISKLALVYGWSMGGMQAYHWAALHPDMVERAAIVCGSARCAPYNHVFLESVKAAITADPAFRDGRFAERPVAGYRAMGRVYAGWAMSHGFYRDELWREAGFTSLEDYLVRAWDATFARRDANDLLAQIGIWQNGDVSRCRTFGGDLDRALAAIKAHMLLMPGATDRYFDLRDNEDELGRLVNARSAVLHPIPSLHGHRAGNPVNNPRDQAFIKAEIAELLSR

SEQ ID NO: 14936 - protein, 315 aa, BradyrhizobiumColbertium
MSDATVPDTGHRLKPLTPAMLRELSVRSNLRGAAQSLGHYGVILLMGALIWKISSSWGVLWALPLMVVQGYVVAFLFMAVHETAHKTAFRSRGLNLAVGHLSAFIIGLPYEYYCLFHWDHHRYTQDPARDPELIVGVKPTSDTQLALAYSGLLQVAGRLQLMLGHALTGKVTVPWIPESKRATIVTEARIYLALYALLLALSFWFSSALLLWVWIVPLIIGQFFLRPYLYAEHTGCDQTRSAFHNTRTTYTGGIVKWFAWNMPYHVEHHAYPSIPFHALPRLNGIVDGEIVHRGRGYIRTTRETWAWFRRQRQTG

SEQ ID NO: 14937 - protein, 410 aa, BradyrhizobiumColbertium
MSATRGRLLVVDDDLVQRVLISKIGSKLGYDSVVVPSYEAAIELLAREAFDIMALDLSLGERDGVELLRFVAERDLRAMSIVIISGCDDRIMKATRRVATGLKLSLGGCLTKPLDLNRLRCALELPRRLPLAAASASPAPRITRDRIARGLAEREFFVEYQPKIALQTGRVVGAEALARWRTAEFGMVSPMVFIPIAEEAGLMGEVTDCILSSAMSQGRKLIERNPGFTIAVNISGSLMSDLTLPERIEAILRQEGVPPSSLTVEITETTAMADVDRANDILVRLRLKKIGTAIDDFGTGYSSLAALARLPFSELKIDQSFIKGCEADDDMMKIVDASVALAKAFNMKVVAEGVESSHALEIIRRAGCDVAQGYYFAPSLRRSRAERWILERNSLADEQAASATAAALAS

SEQ ID NO: 14938 - protein, 84 aa, BradyrhizobiumColbertium
MFRKLALGLIAAASLGVAALAPTAASAGGFHGHPWGHHHYWGPGFGFGGLYVNTGISNCYQERLVRTRHGLRVRVVNVCAYGIY

SEQ ID NO: 14939 - protein, 324 aa, BradyrhizobiumColbertium
MRASRMLSILTTLQARGRVTAPELADAFEVSVRTIYRDIDALAASGIPVYADRGADGGYRLLDGYRVRLNGLSQSEAGALFLAGLPGPAAALGLDAAMLAAQNKLMAALPANLREDAGRMQGRFHLDAPTWFGEAENPKHLRAIAGAVLRDTLIKIRYRSWRAEKQRRIGPLGLVLKGGSWYLAGDVDGSVRTYRVARVLDCTALDDRFDRPAGFDLAAYWRAATLRLEAEMHPNVATVRLSPFGVKLLDALSQPYVKARMQLEETPDADGWRIARVPVGKTSWHAAAELLRLGPEAEVLEPADLRDKMAELIKAMGVRYRAVQ

SEQ ID NO: 14940 - protein, 214 aa, BradyrhizobiumColbertium
MTDPNRITLYYSPQTRATGTRILLEELGAPYDLHVLNMKAGQQREPAYLAINPLGKVPAIRHGEALVTEQVAITIHLADLYPQAGLTPALNDPLRGPYLRWIAYYGSSFEPALIDKFMQREPAPVTQSPYADYDTMLAALEAQLSKGPYLLGERMTAADVLWGVAFSWTMMFGIVPKKDVFVRYADRMTARPAFQRINAEDAEMAAQHAKAAGG

SEQ ID NO: 14941 - protein, 261 aa, BradyrhizobiumColbertium
MSDTADAATGPLLEIIGARATIRLNRPQHLNRLQAEDLGELTRLFDRIETDPDIRVLVLTGTGRAFSAGYDLNSVAERAVSANEQQSAGSAFEVVVNRLEDLGVPTICRLNGGVYGGSTDLALACDFRIGVDTAEMFMPAARLGLHYYPSGIKRYVSRLGLDSAKKLFLTAQKISAPEMLRIGYLTAMVPLESLDEEVDKLAAILAGNAPQAMRGMKRAINEFARGELDERAADQRHRDSMRGDEIKEGIKAFAEKRAPRF

SEQ ID NO: 14942 - protein, 72 aa, BradyrhizobiumColbertium
MRALLIILLLAMLAAAGYFAYSAMVGEGEPIPTEGYVALALGAGFSVIVGVGLMVLLFFSSRRGYDEPPHFR

SEQ ID NO: 14943 - protein, 462 aa, BradyrhizobiumColbertium
MIKTNQQQVFLYVVLTLLLSFATVWAGRSLLHNSETLTFAVGAPNGDEALFAAKLATVVQNNASRLRIKVVNNADNAKALVQFDRKQADLAVLRTDAKIPLRARTLAILEHDLVLLFGPGNKKIKSLAELKKKKVAVVSDNESSLAFVRSILDVADGPDATRIQLAPQGATLDKLFAPANGFGAVIAIVHASRAVRDKSYEQAAKRGGFTLNAIDEAKTLARKFPGISDETLTAGTVSASPQIPNDDLDTIGLEWLLVAQSRMSPTTAGELARIVYENKSALGLDNGFATRIEPASVEKDAFVIAHRGAADYINDDTKTFVDKYSDLMYLGAAALSVIGSIFAAIYAKITRIAPEKASELSTAILDIGERIEHAHSLDQLECLQDELEAILRGAVIGLRDGTISTDGLDTFKLGYEFVRDEISMRRDYLKRHAGEAEKPARDGGAPPSDDSNVVVVKTAHSA

SEQ ID NO: 14944 - protein, 115 aa, BradyrhizobiumColbertium
MLLLTFKHIIADFVLQTAWMAHGKDQKHGWALPLLVHCLVHLAVALPLILIVAPRFWFVAFIDFAIHITIDRAKGFVSANFGVDLAHPWFWTLIGVDQALHHLTGFGLSIFMAAN

SEQ ID NO: 14945 - protein, 40 aa, BradyrhizobiumColbertium
MLAPWLRIGGVLMLARHSAAREAKTGNLEIPRPALRTAPE

SEQ ID NO: 14946 - protein, 132 aa, BradyrhizobiumColbertium
MFASRDTFEGDSCPVRDELLGEMYRASESGLPRLVESVSPDARARLALFCYRRSHLHSLAVAIAASCSERDLIENGGRVGSTLYALSRESSAKSSPSLSGGRKPITLSTKPLSVLAPLDDELDDETSEAVPA

SEQ ID NO: 14947 - protein, 105 aa, BradyrhizobiumColbertium
MMQETDLSSCCQGCGACCGYSQNWPRFSIESDEELAAIPETLVNARQSGMRCEGDRCSALQGKIGEMTTCGIYELRPEVCRTCMPGDAECAMARRKFGLPIIEAA

SEQ ID NO: 14948 - protein, 232 aa, BradyrhizobiumColbertium
MRRADRLFQIIQVLRRTRKPLTADAIAAELETSKRTIYRDIATLIGQRVPIRGEAGMGYILEKGFDLPPLMLTPDEIEAAVLGAQWVAGHADSALARAAEDLMAKIADTVPERLRPFVLEPASRARPSWNREPDRLDMVRTRTQIHEGKKIMLRYRDEHGRPSERMIWPISVGYLEAVRLLAAWCELRGDFRSFRTDRVVEATYLDEKYPERRDVLRARWRQSLVWGPPKDT

SEQ ID NO: 14949 - protein, 86 aa, BradyrhizobiumColbertium
MIIPTHFGPAVPMLRAQAWSAAVFGRLVSLDLVAVDLRFALASAVIRPLVRVADALVRHLMGRAWRGARFAEDIMAAATMVAAARR

SEQ ID NO: 14950 - protein, 242 aa, BradyrhizobiumColbertium
MITLYGFGAGFGLPEISPFVTKTEVQLKMAGLPYRKERAMPPASPKGQLPFIDDGGEAVADSTFIRAHIERRYGFDFDAGLSLQERAQAWAFERMIEHHVYWALVGARWVDPVNFAKGPAHFFDGAPEHNREKLREDAQFRVAENYLLSGLGRHGPDDDVDLAVRSLFALSVQLGDKAYLMGKKPCGVDATAFGALAGILTPFFESALRERTEAFPNLTAYVDRMMDDYYPEFAWTPLRQAA

SEQ ID NO: 14951 - protein, 383 aa, BradyrhizobiumColbertium
MKRFYLTAAITAAALALPALPALAQTSEVTIGITTATTGPGAALGIPERNALEFVPKEIGGVPLKVIVLDDGGDPTTATTNARRFVTESKADIIMGSALTPPTIAVSNVANEAGIPHFGLAPFPITPERMKWSVAMPQPIPIVGKVLYDHMKSKGVKTLGYIGYSDSYGDLWFNDLKAQAVPMGMTIVDEERFARPDTSVTGQVLKLVAANPDAILVGASGTAAALPQTELRERGYKGLIYQTHGAASMDFIRIAGKAAEGVLMASGPVMAPEEQPDSALTKKPGLALNSAYEAKYGPNSRSQFAGHSYDAFEILKRIIPVALKTAKPGTPEFREAIRQALLTEKELAASQGVYNFTEKDRYGLDQRSRILLTVKDGKYTLVK

SEQ ID NO: 14952 - protein, 139 aa, BradyrhizobiumColbertium
MFVNRREVQIQWGDCDPANIVYYPRYFAMFDDSTSTLFEVAGLSKQDLVRKYGLVGIPMVDTRAKFYIPSTYGDWITIETRIESIKRSSFEVKHNVYKGEALAIEGFETRVLVGRDPVNPDKLKSAPFPAEMVAKFTGS

SEQ ID NO: 14953 - protein, 253 aa, BradyrhizobiumColbertium
MLLKDQAAIVTGGASGLGAATARKLAAQGAKVAVCDLNTKLAETVAAEIKGVAVTCDVSDAASAEAAIAQATKAHGPARVLVNCAGIGVAKRVVGRDGPMALADFDKVIKVNLIGSFNMLRLAATEMSKLEPQATGERGVIINTASVAAYDGQIGQSAYSASKGGIVGMTLPIARELAQFGIRVLTIAPGLFLTPLLANLPQEAQDSLAAAIPFPRRLGNADEFAALALHMVENAYLNGEVVRLDGSLRMAPK

SEQ ID NO: 14954 - protein, 627 aa, BradyrhizobiumColbertium
MSAQPSSSSMERGASTFPLRPISFGDPAVDIERRDDGTIYLRPKQPLGDYPVRITERLHHWAITTPDRVFMAEREGGRGWRKITYAELLIASRHIASGLIARGLSAERPVVILSGNSIDHALLAFGAFYAGVPFCPVSPAYSLVSKDYGKLSYLMKLLTPGLVFAEDADKFADALTANVSLGTEIAASYGHVHGRDVTSLADLMATPIRTDLDEVHGRIGPDTIAKFLLTSGSTGNPKAVINTQRMICANQVMLRETLAFLKDEPPVIIDWLPWNHTFGGNHNIGLTLYNGGSMYLDAGKPMPGGIEETVRNLQEISPTVYFNVPKGYESLLPYLRDDQGLRAKFFDRLHAMFFSGAALSPFVWNSLDELAVKEKGYRVPMLTGLGATETAPFFMSVNPRTSRSGHVGLPVSGNDAKLVPNNGKLEVRCKGPNVMPGYWRQPDITAKSFDEEGFYKLGDALKPADPDDLNAGFDFDGRVSEDFKLASGTWVSVGPLRARFVAACAPLVRDVVIAGINRDEVSALVVLDLDGCRLINPTLPINDLVVATRDRLVREAFRERLTRFLSQATGSSTRITRAILMDTPLSIDKGEVTDKGSINQRAVLEHRTELIEELYAANPSNRVISVG

SEQ ID NO: 14955 - protein, 269 aa, BradyrhizobiumColbertium
MTQGNAETASAGASGLLKIERADRVLTVGLNRPAKRNALNDGIILEIGECFASLPDDVGAVVIHGIGDHFSSGLDLSELTEHDATGGLLHSQMWHRVFDRIQYSRVPVIAALRGAVIGGGLELACAAHIRVAEPSTYFALPEGQRGIFVGGGGSVRLPRLIGVARMMDMMLTGRVYSATEGASYGFAQYLTEAGNALPKAMELATKVASNAPLTNFAVLQALPMIAEANPQTGLLMESLMATVAQSDKEAKRRIREFLEHKTAKVKPKS

SEQ ID NO: 14956 - protein, 153 aa, BradyrhizobiumColbertium
MTTPTLQTKYVFTITARIGDVVTAGETGIGVRRIIPIIGGEVKGAIAGKVLPFGADFQTIRPNELIDLEAKYAFETDDGAVIYVENKGMRFGPVELLQKLKRGEPVDPKLIYFRTVPKFETGHEKYRWLMEHIFVGSAARHADRVVIDVHQVM

SEQ ID NO: 14957 - protein, 439 aa, BradyrhizobiumColbertium
MSTDAVAVLGFISLFALMLLRVPVGMAMGLVGVCGFSYLVGSTPALKMVGQVTMRTVTDYTFGVIPMFLLMGSFVSNSGMSRELFRAANGFVGHLRGGLGIATVGACGGFAAICGSSVATAATFSAVAYPEMRRFGYPQSFATGVIAAGGTLGAMLPPSTVLAVYGIITEQDIGKLFIAGIIPGLLAMTMYMLTIFLIGYFRPDFLPKGKVTPWRERFAGLKDIWAPVLLFLFVIGGLYGLPFLPRFTPTEAGGVGAAGAFIIGVLTGRLDREKVLASLLQATRTAAAVFTVLIGALIFGYFLTVTQTPQKVTEFLTGLGLGPYGVLGLILVMYLVLGCLMDAMAMIILTVPIIFPVIIHLGFDPIWFGIIIVMTVELGLITPPVGMNVFVIKSVVKDVSFSTIFKGVSPFVATDLVRLVILIAFPLLAIWLPTRMMAH

SEQ ID NO: 14958 - protein, 169 aa, BradyrhizobiumColbertium
MKRSWMDRIIDSIEWIAAGFVGIVALDIFLSVLLRNTMNYSIPDSFDIGRMLLGILIFWGIAATSYRGTHITVDLVWANVGPRYQRMIDVFATLVLLFVVTVQTWTLFDKVRLTYNDNVQTFDLHMPTWPFFLVAWIGDVCAVLLIAIRTYRLIFHPEDMHEPKIKVTE

SEQ ID NO: 14959 - protein, 338 aa, BradyrhizobiumColbertium
MRKACLALLLAASVSPALAQDKTFDLKISHWVPASHPLQKSLEDWAAAVEKDSGGTIKSKVFPAQQLGKAFDHYDMARDGIADVTYVNPGYQPGRFPIIGAGELPFLISDAKGGSMGLDAWYRKYAEKEMKDVKYCLAFVHSPSSFHSRSKKIVNPEDVKGMKIRPAHATMANFVTSLGGTNVQSSAPEVRDIIERGVADGVTFPWGSLVLFGIDKVTKYDMEAPLYTTTFVFVINKDKYNAMSDKQKAAIDKNCSVETAGAVGEHWGKFEDAGIAKVKAESGHEVYKLTAEQTAAWKKAAEPLVKTWSDGAKKAGADPDAALADLKASLKKYNALAE

SEQ ID NO: 14960 - protein, 389 aa, BradyrhizobiumColbertium
MRTKVAIIGAGPAGLLLGQLLHTYGIDNVILERQSPDYVLGRIRAGLLEEGTVALLDQVRAGARAHAEGLVHEGIELAFSGRRHRIDMKGATGKTVMIYGQTEVTLDLMNARKAAGLVSVYEARDVQPHDFDGSHPRVTYVKDGVTHTIDCDFIAGCDGFHGVSRASVRANAIEEFERIYPFGWLGILSDTPPVSHELIYSNHARGFALCTMRSTKRSRYYVQCSLDDHVDQWPDDRFWDELKRRLDQKAADSLVTGPSIEKSIAPLRSFVAEPMRIGRMFLCGDAAHIVPPTGAKGLNLAASDAHYLSSALREFYDERSSSGIDAYSAKALARVWKAVRFSWWMTSMLHKFPDTGTIGARIQLAELDYVTQSKAAMTSLSENYVGLPF

SEQ ID NO: 14961 - protein, 294 aa, BradyrhizobiumColbertium
MDRLEAMHVFVTVADLRGFAPAARKLRLSPSAVTRMIAGLEEHLGARLLQRTTRQVRLTDVGTRYLERARRILADVEEADGSARQERNRPSGRLVVSAPVGFGRLHVGPVMTAYLKRYPEVTCELRLSDHLVNLVEDAVDVAVRIGHLADSSLVARQVGQMRRIVVAAPGYLKRHGEPKTPDALCEHQTIQFGPWSEWRFLQDGRDIEVTPSPRFTSNSADAALQYAEAGGGVTRVLAYQAAEGLKRGRLRIVLANYEQPALPIHIVYPTSRLLSAKVRAFIDLVVETTDWRFG

SEQ ID NO: 14962 - protein, 209 aa, BradyrhizobiumColbertium
MTTAAHAFASDIAFSPAVKAIQARKGSREAYARSEQRGWRTEVDDNLAAFLADANSIYFATAAADGQPYIQHRGGPKGFLKVLDKQTLAFADYAGNQQFITQGNLSENPRAYIFVMDYAHRRRVKIWGDARIVEDDEALTTSLMPKGYRARPEQVILFKIVAWDTNCPQHIPQKFDAADVAAALAARDARIAELEAEVAALKGAKAATS

SEQ ID NO: 14963 - protein, 243 aa, BradyrhizobiumColbertium
MSALLSVSDAHVAYGKVEAVRSVSLEVGTNEIVTIVGANGAGKTTLLSAIMGILPLKGRVAFAGQDLAQLDIEDRVAMGLGLVPEHRELFVTMNVEDNLELGAFRIERSKAKASMERVYALFPRLKERRKQLAGTLSGGEQQMLAMGRALMGEPKLLMLDEPSLGLAPIIVADIFRIVTELRAAGVSVLLVEQNAQAALKIADQAYVMELGEFVLSGKASDIAANERVAASYLGFQHEGESAV

SEQ ID NO: 14964 - protein, 589 aa, BradyrhizobiumColbertium
MQGRLPILVFAAVMAAIPFIPGIPPFWIVLLDNIGLAALVAMGLVLLTGVGGLTSFGQAAFVGFGAYTTAVLSTAYGVSPWLTLPLSLLVSGLFAVLLGLITVRLSGHYLPLGTIAWGLGLFYLFSKLEFLGRNDGISAIPPLSIGSLKMLSPGSIYYAIWIAVIVSALLTINLLDSRTGRAIRALRRGHIAAEAFGVHTPRAKLLVFIHAAVLAGLSGWLYAHLQRAVNPTPFGAHMGIEYLFIAVVGGAGYVWGGVLGAAIVVILKEALQSYLPLILPGSGQVETIVFGIMLVALLQFAPGGLWPWLMSFFPERTGGKKPDTSLKLEHRARAAAESGVLLQVEKARKQFGGVVAVNNVSFDVQAREIVALIGPNGAGKSTTFNLITGVLSATSGSISVLGKKVDNAPPQEIVKLGISRTFQHVKLVPDMTVLENVAIGAHLRGHSGPVASMLRLDRADEARLLAEAARQIERVGLTEQMHQLAGSLSLGQQRIVEIARALCVDPMLLLLDEPAAGLRHMEKQRLATLLRDLRDGGMSVLLVEHDMSFVMNLADRIVVLDFGTKIAEGTPATIKTNPEVIKAYLGVAA

SEQ ID NO: 14965 - protein, 38 aa, BradyrhizobiumColbertium
MGSRPCIARQSFSSSTAGAASERSSSTGISNMKTITSL

SEQ ID NO: 14966 - protein, 320 aa, BradyrhizobiumColbertium
MNTTIMLFLVQDGITNGAIYALLGLALVLVFAVTRVILIPQGEFVTYGALTYASLAAGQMPGTAKLALALGIGAFAFDLFEARKALHGRLIVRGLITNIALPAIVLALTLYFAAQKPPVAICIALSLVIVAMIGLYIYRIAFQPLAHTSVLVLLIASVGVHLALQGLGLLFFGAEGQRGPALLSGAFTAGALRFTGQSITVYAITIAFIVGLWLFFGLTLYGKALRATAVNRLGARLAGIRTTLSGQIAFLLASVIGALSGILIVPITTLYYDSGFLIGLKGFVAASSAAWSAIPSPPSRRWSSASSRRSRPSMPPTTRR

SEQ ID NO: 14967 - protein, 172 aa, BradyrhizobiumColbertium
MTVSKTAEKSSEKAADAKGRKDAGDVHAEALQLGELSEQLGYVLKRAQLKVFENFLRCMASLQLTPAQFSVLLLVEKNPGRNQTEIASTLGILRPNFVAMLDNLESRDLCARIRSTNDRRSHILVLTDKGKAVLARAKKLVATKHEARLNDLLGQANREALIGMLAKIANEF

SEQ ID NO: 14968 - protein, 427 aa, BradyrhizobiumColbertium
MTDRRPLLRALYGAAVAAAHPNTILAPHLRAAPKGRVICLAAGKGAGAMAAAAERHYLDAQGLAPERLVGIATTRHGYGVPTRRIRVVEAGHPVPDEAGLKGAADTLALAGEAGPDDLLLVLLTGGGSANWIAPVDGVSFAQKQAVNRALLRSGAPIGEMNIVRKHLSRIKGGRLARAGRNAAEIVTLAISDVPHDDPSAIASGPTVPDPTTLADARAIVAKYKLDIDEAVRRALDDPANESCKPGDTAFAHAHFELIARPRQSLAAAVKLAREAGYETIDLGADLEGEAREVAADHARLALQARAQGKRIAILSGGELTVTVRGNGRGGPNQEYALALAGLLQDTAGIAALAGDTDGADGGAGNPTDPAGALIDATTFAKMKAQGLQPQAYLDDNDATAFFEATGDLLTPGPTLTNVNDIRVILVD

SEQ ID NO: 14969 - protein, 409 aa, BradyrhizobiumColbertium
MPAVTGKLAAASLALALIATSTSTASAQKKYDSGATDTEIKIGNIMPYSGPASAYGVIGKTEEAFFRKVNAEGGVNGRKINFVTYDDAYSPPKTVEQARKLVESDGVLLIFGSLGTSTNGAIRKYMNEKKVPQLFVASGASKWNDPKQYPWTMGWQPNYASEARIYAKYIMKEKPGGKIGVLYQNDDYGKDYLKGLKDGLGAKAASMIVLEESYETSEPTIDNHIVKLKATGADVFINITTPKFAAQAIKKNAEIGWKPIHFLNNVSASVGSVIKPAGFDNAQGIISAAYLKDTTDAQWANDAGMKAFLDFMTKYFPEGDKTDGGTVVGYGVAQTLVQVLKNCGDDLTRANVMKQAASLKDFRTEVLLPGIKINTSPTDFAPISSLQLQRFKGERWELFGDVINAEAGG

SEQ ID NO: 14970 - protein, 303 aa, BradyrhizobiumColbertium
MLLIFNSLGTPPNSAIQKYMNQKKVPQLFVATGATKWNDPQNFPWTMGWQPNYQSETIIYAKYILKNKPDAKIAVLYQNDDYGKDYLKGFKDGLGAKAASMIVIEDSYEVSEPTIDSHIVRLKATGADVFMNITTPKFAAQAIKKNAELGWKPLHFLNNVSGSIGSVIKPAGFENAQGIISSQYFKDPTDAQWKNDPAMIAWNEFLDKYYPEANRADASVMYGYIVSQGLVHVLKACGDNLTRENIMKQAASIKDFEPAGLLPGVKVNTSATDFAPLSQLQLIRFKGEHWERFGEVLSGDVGG

SEQ ID NO: 14971 - protein, 370 aa, BradyrhizobiumColbertium
MPVPFADLSLQYQSIKGEIDSAIAAVIRDSAFIRGPYVEAFEREFAAAASVKHCVSCANGTDALYLAMRALKVRSGDEVITAAHSWISTSAMITHAGARVVFCDTDGETFTIDPAAVEAAITPRTVGIIPVHLYGQPADMDAILEVARKHGLWVIEDCAQAHLARYKDQPVGTFGTAATFSFYPGKNLGAMGDAGAVVTNDTILAEHIAMLARHGGLVKHQHHIEGINSRLDGLQAAILSTKLPHLADWTRARQAAANFYDDALHKMEQVQTPKVAAGRTHVYHLYTIKHRNRGALANHLNRRGIETVINYPTALPLLPCYRYLEHRPEQFPNAYADQNTILSLPLFAEISHEQQEEVVTAFRSFVDTVC

SEQ ID NO: 14972 - protein, 145 aa, BradyrhizobiumColbertium
MRDVKFGQRVKMVEPCNLYGCEIADDCFVGPFTEIQANVVIGARTRVQSHAFICELVSIGEDCFVGHGVMFVNDTFSTGGPARGRRELWRATKIGNRVSIGSNSTIMPVSIADDVVIGAGSVVTKDLAAPGTYAGNPARLLKSSS

SEQ ID NO: 14973 - protein, 317 aa, BradyrhizobiumColbertium
MKPRADALATKFGVDAYDDIDKFLARKDMDAVAVLTPSGMHAQHAIACARAGKHVVVEKPMALRLQDADDMIRACDEAGVKLFVVKQNRFNVPVIKAREAFEAGRFGRLVLGTVRVRWCRDQAYYDQDTWRGTWAYDGGVLTNQASHHIDMLEWFFGDVVSVHARATTALVKVETEDTAVATLKFRNGALGIIEATTAVRPRDLEGSLSILGEKGVVEIAGFAVNQIRHWSFVDTLPSDKLVVEKFSVNPPNVYGFGHQAYYQHVVDCLLHQRAALVDGLQGRKSLELISALYESIETGQEVALRFEPRRSKLGVLP

SEQ ID NO: 14974 - protein, 87 aa, BradyrhizobiumColbertium
MYYVENGSYPSPSAGLRALVEATPEAPRWNGPYLKNAKTLLDPWGRPYQYTVSEQGEYNVYSLGPTGKGTKKPTSAANAGRSWADNG

SEQ ID NO: 14975 - protein, 72 aa, BradyrhizobiumColbertium
MFGGVVMTVDTSKSSASRCFKKPRYDKRRSAVAGYTLLELLVVMGILAALTAMATPQVMGYFGKAKTQSAQL

SEQ ID NO: 14976 - protein, 790 aa, BradyrhizobiumColbertium
MTNEADTCRKFVVPKLQSAGWDDEPHSIAEQRTITDGRVIPVGRGFVRKPPKRVDYLLRYARDFPLAVVEAKASYKSATDAVQQARSYAEILGLKYAYATNGTEIIEIDYFQGTETLVADFPSPGDLWRRYQLGSGINTPERVDHLIAPYNTVGGKPPRYYQQIAINRAIESILAGKQRLLLTMATGTGKTIVAFQICWKLWSSRWNSTGEHRKPRILFLADRNILIDDPKDKTFTPFGDARHKIESGEIVKSREMYFAIYQALAEDERRAGLFRNYPPDFFDLIIVDECHRGSARDDSSWRAILEHFKPAYQLGMTATPLREDNRDTYLYFGNPIYEYSLRQGIDDGFLAPYRVHRVITQWDAAGWRPSKDEVDRFGRAIPDDEYQTKDFERTIALRARTQAIAHHLTDFLKKTDRFAKTIVFCVDQEHASEMRQALVNLNADLVAQYPDYVARVTADEGAIGRGHLSKFQDLETKTPTILTSSQLLTTGVDAPTCKNVVLARVVGSMSEFKQIIGRGTRLRDDYGKLWFNILDYTGSATRMFADPDFDGDPARITEEEVNDAGEITSTTETLPEGQEPEPATPEEGDTGVIEPPTGEPRKFYFDGGQVEVVAHLVHELDPNGRQLRVVKYTDYAAESVRSLAPTSAELRKRWADADQRGEIITALGERGIDFDVLAEETGQTDADPFDLLCYLAFNAPLRTRRERAQRLKAERKDYFEKFSPEARQVLDELLEKYAEHGDAQFVLPDVLKVPPISTHGQPAEIIKLFGGPDELRRAVNDLQGLLYGSN

SEQ ID NO: 14977 - protein, 443 aa, BradyrhizobiumColbertium
MSAKVPLLIGEVFVDFTITPPGSENKLRLGGVAHAARGFWALGQPFRAAIVSPSYLEGLVRDYFATLGCVELIILGIVTGAPNVTLIFDAIEVADQGYDTPLRDEKAVQLIDVSQKFEQAEEVLIFPGTFCLSDVCAMLPATARLHIDIAYNVETPMALAGIGRPIETILLSTSSPLFAKIKDQTVTGIATAFAGCKPRYVILKQNRGGSELLDNSKASQSIETLPAQLGTTINSVGVGDVFAAVFLTALPSGAATAGWRATYAAAAYSQTTYPDIFKKYVERDQRLSLQEMTSLGGTFLPWNMRPQAQIYFAAPDFANADRAAIDKALKALAYHNFSPRRPVVENGELPPNSNAATLRAIYEKDCELLKKCALVFAVPTERDPGTLVEIGLAIEAGIPVVTYDPSRKNNNTMVIAGSSFYSSDLDACLNAVFQLLSQRRGEA

SEQ ID NO: 14978 - protein, 206 aa, BradyrhizobiumColbertium
MSALLLCSGGLDSTTVGYWLVEKRISFQPVFLDYGQHCVEKEWETVQEVLPATDLASPVKRIDISSIYQDSTSRLIAEPDLWSEHVEDDELYIPYRTLLFFSIGACIAQTRGLDTVYSGFINSNHAKELDCSATFLNGLDSLSRNLGPIRFELPFRDWSKADVVRLASELKVPIGRTYSCQLFSDTPCGACPNCVERLTAIESLYT

SEQ ID NO: 14979 - protein, 76 aa, BradyrhizobiumColbertium
MDFIAVDRHIRAFANDAGVKSEDYDFLKLVVSYAADLIGVSRRHFDAAIWTYVSSQKGLQAKTALALPLAASIAVA

SEQ ID NO: 14980 - protein, 431 aa, BradyrhizobiumColbertium
MTKKYLQHFPKPILEDFVRGRWLPIIGAGMSLNAILPPSAKMPLWSELGKLFADELRDYSPNSVLDGISAYEHEYDRARLVERLVEFLHLDAARPGPAHREFCTLPFDVVCTTNFDFLLEKAYDIERQDKRTVHPVVDEDQLSINVGTSGTLLLKLHGDTRHPKRLVVTEADYDAFLTDYPLMATFLANLLITKTAVLIGYSLDDPDFRQIWQVVTTRLGKSRRTAYAILVGAKPGDIARYERRGVKVVNLPGTRNSYGTVLAETFAELREYRREHAGPTLKPTEEKPLEQLLLPRSAMTRLCLFATPLDVLPFYREHIFPLAEEAGFVPVTAADVVDLAESVSAKIDTLIDRSAVVVVDATSTATQIELGLALSRLRRESERLLFDVIIVVSDLSQLPTPWPFVWINRLSAIYDDTDFVEEIGKRLIAAG

SEQ ID NO: 14981 - protein, 58 aa, BradyrhizobiumColbertium
MSMRQLLDYARERQLIDDPETILEWNRIRNDAVHGGRPVTRAQAKIIVEGVERIVDRG

SEQ ID NO: 14982 - protein, 357 aa, BradyrhizobiumColbertium
MDRRKRVFVAARAEFGALNHDFSFFQLRFGMIAKRSIESARGPNKSAIGILLRFGDMAVVSDPTQALLAPHTRLAVRVLAVHGIHADDAVDIRPAADNFIDRARFVMNCFQPREDVADHGGMIVIGPKQLGSLDFHGMARGLHTVAQTMFASNTFCLGFGRERFGVRLFKIVEARGGAIGSAPVKFIFCFGLLMGSIIHQAETGQCCAALGKSSVMLGARLLDFGSDIGGSNRLLAEEGLQNAHSAWAQGVKSTPPIVRDGFRAGVSRCYGRCFRGRLQSGLRCTGSECFMSAEPAVIGDMLAALGEHQIVRDSVPDVETLRRKLPLSRCVICGRRIEVGEKLGAAHWASPPAAIQV

SEQ ID NO: 14983 - protein, 56 aa, BradyrhizobiumColbertium
MYLSRTQAAKRVGRCAKTLRNLAKRGDGPPFLLIGDRPAYPAEQLQTWIAAGGDAQ

SEQ ID NO: 14984 - protein, 37 aa, BradyrhizobiumColbertium
MRAEKRAAVLAEHDARLTRIPANDNVKQSLGSEASAT

SEQ ID NO: 14985 - protein, 50 aa, BradyrhizobiumColbertium
MFDSNIDQRAKSLGNAHSHLEGERSEFTREFGMGQYFKRGNGDKAVPESR

SEQ ID NO: 14986 - protein, 68 aa, BradyrhizobiumColbertium
MNVMAQGVDHDDIVMSCAQSTTHMTAYETFATSHDDTHCYLVTVKPDAEPRRWCRKPKASRKNTAEIL

SEQ ID NO: 14987 - protein, 38 aa, BradyrhizobiumColbertium
MLFDELDGKAIAHLEGVCGAKAPATRQFVFELKRAGSQ

SEQ ID NO: 14988 - protein, 360 aa, BradyrhizobiumColbertium
MGVVPPIHVAATFIRDPDNGYSSGHIYGRTDNKTVQLAEDLIAALDGAEEALLFGSGMAAATSVFLALGQPSHIVASEVMYWGLRSWLREIHRYGHDVTFVDTSDLSAVASAIVAGSTKLVWVETPSNPLWTITDIEAVADLAHAAGAILCVDSTIATPVLTRPLALGADIVMHSATKYLNGHSDVVAGSLATLRKDRFWTEIRKVRETHGSTLGAFEAWLLTRGIRTLDVRVREQCTSAFQLAHRLARHPAVSAVLYPGLPGHPGHGVALRQMINGFGGMLSFRLAGGESAAICAAAQVKLWKRATSLGGVESLIEHRSSIEGAGSPCPPDLLRLSVGLENVDELYADLEHAFLCLRTD

SEQ ID NO: 14989 - protein, 86 aa, BradyrhizobiumColbertium
MFGEYGLFCDGKVVALVCDDELFVKITPAGKAFGGKLPKAPAYSGAKPSLLVSADRWDDPEWMSQLVRVAAAELSAPKKRPPGKAQ

SEQ ID NO: 14990 - protein, 112 aa, BradyrhizobiumColbertium
MFYEKAFCLRVRFVHESKRYAELDTGSVTLAFAGELMAKMNELAIRPNRSADAAAGFEIAFVCDDPDDAYKKAVTAGAIGVKSPASKPWGQTVGYVRDLNGCLVELCSPMPG

SEQ ID NO: 14991 - protein, 92 aa, BradyrhizobiumColbertium
MSVAELAKMHQVDERTVRRRVKESTGLTPKALSMILQFHRALRLVRDVGLDPVDAATEAGYADQAHMTRTFRALGGFTPANIPDVTLAGLPL

SEQ ID NO: 14992 - protein, 90 aa, BradyrhizobiumColbertium
MTERHHLIRPRWAGDQRLNIPDCAGIIELKSKNKVASTVGQNAMFAVLSGNAGPHGLDAAALIVVVGMLSVFGGKKHGVSALERGERGKR

SEQ ID NO: 14993 - protein, 387 aa, BradyrhizobiumColbertium
MDATQNVRHSPKIDGCAPPPRQIVLVLQGGGALGSYQAGVYEALHEAGVQLDWIIGTSIGAINASLIAGNAPENRVFRLREFWQRMSRPSAWSYARYFPAIGEAAMYWSTVANGLPGFFKPNPLAHAGINHVLGPEQAGYYNASPLEQTLRELVDFDMINQGPLRLTVGAAHVRTSQMRYFDSRDEAITVKHVQASGALPPAFPAVRIDDELYWDGGILSNTPTEAVFDDNPRRDSLIFSVHLWNPQGAEPETMAEVLNRQKDVQYSSRIASQIARQQQIHKLRHIISSLAARLPDGIREGADVQELASYGCQTTMHVVRLLAPQLDRETHTKDIDFSTEGVEQRWAAGYAHTKSVLSSRPWEQSVDPLTGVVFHEHMELVPKAADI

SEQ ID NO: 14994 - protein, 295 aa, BradyrhizobiumColbertium
MNHGRDSTTAFVFAGGGSLGAIQVGMLLALAQAGVVADMVVGSSVGAMNGAYYAGEPTFQNVQRLAEIWRNLRRQDVFPVTIRTMLGFLWRRDFLVSQTGVRKLIRNNLPYRNLEDAKIPVHVVTTDIASGDTVVLSTGSAEDAITATTAIPGAFPPLLYNERYLSDGAISSNTPVRIAMLKGANRLIVLPTGYACANQAPPTGAVANALHALTLLIARQLIQEVEAVGDDIDFHIVPPLCPLSGSPYDFSMTDQHIARSYEHTMLWIESGGLKRDEVPVQLRPHQHFGARVHAE

SEQ ID NO: 14995 - protein, 253 aa, BradyrhizobiumColbertium
MIIHGVWGQVMTMQGVAAKPGASSKTGGKPQLNPRRLHPWPIRVMHWINAVTMFIMIGSGWKIYNDEVIFGWLHFPDYLTIGHWAQHGLQWHFFGMWIIFFNGLAYLVYGVLTGRFRRMLLPIGRRELLYTVRDALRFKLAHEETTKYNAVQKLLYLGVIAAGIGVVLSGLAIWKPVQFSELYVLFHDFQTARLVHFLCMTAIVLFLVVHVALALLVPKTLVAMVTGGPVLDDDGTAANMRLDVSTTIEENLK

SEQ ID NO: 14996 - protein, 188 aa, BradyrhizobiumColbertium
MPLRRSLSATALILTSLAASAMTSLSAEAPQDLKTRLEVAATRNTAPDFVGITKWFNSVPLDMANLRGKVVLVDFWTYGCVNCVNTLPHVTALYEKYKGRGLVVVGVHTPEFPFERSASNVQAALKRHGITYPVAQDNDSKTWNAYRNQYWPAQYIIDQHGSIVFQHAGEGQYEQIERTIAGLLDASS

SEQ ID NO: 14997 - protein, 229 aa, BradyrhizobiumColbertium
MLDVVLALIAGLITVAAPCTLPMLPIVLGASVGQTSKTRPVMIAAGFVFSFSAVALALNAIVRVSEFDPDVLRSAAAILLAGFGLLMLWPLPLERLMSHLSGFTNVSVSANYRVFGGFVLGTTLGLVWTPCAGPVLGSILTVIATSTDTRWASTLLVTYAVGAAIPMLAISYGGQVLTTRLRSFTRIAPRLQQGFGVVVIGLAALSYFQYDTLIVAWLTHFYPNGQIGL

SEQ ID NO: 14998 - protein, 52 aa, BradyrhizobiumColbertium
MSTALAVHLERSGGNSCRTPQQDKRRQSLANAHHHKRTVMDEQMRLIGAIFQ

SEQ ID NO: 14999 - protein, 238 aa, BradyrhizobiumColbertium
MRSGALTLAQAGVPDVFVDEPTLLFFPRAREHRFTGSAKGGADLICATVDLGASIGNPIGEGLPDLVMMPLSRHPALAPICGLLVEEGLSEHEGRQVALDRLFEYLLILIVRHVVSSGAVAGGVLAGLADPRLGRALTALHAAPRRAWSVEDLAESAGMSRTRFATHFRAVVGRAPMDYLTVWRMTLARQLLAKGKPVKSVAAEVGYDSAAAFSRIFSRVTRQTPREAAVSRKGKEGA

SEQ ID NO: 15000 - protein, 181 aa, BradyrhizobiumColbertium
MSRIAPTDPATADSGVQAVLAAVKAKIGMTPNLFRTFARAPAVLNGYLAFSEALSAGALTARQREILALAVAQANSCHYCLSAHTLMGKGVGLSTEAIEAARRGTAHDGTDKALVTLALRIVETRGQITDADLASARLAGLSDAHVVEVVGQVALNVLTNFTNNVALTDIDFPKVDPAVAA

SEQ ID NO: 15001 - protein, 301 aa, BradyrhizobiumColbertium
MFEQTLEREVAMAEDALFQDVIRRRRSVRKFEAGRSISRDVLQRIVDCGRWAPSGANVQCWDFVVVDDPDVRDRVMAVFLRQAQRLVDHAKGFPAVKKTYLANTIAIVFVLGDPRWKACFPQATTDEWDAEYRANNEAIFLCSLGAAIQNIQLGVAAEGLTSAWLSGGGEEETNRELADVLGYPAWMRAYGTIPIGYPAVDQRRRYRRPLGQVLHWNCYQTSQYRSHAQVDFYESTLRPFAMYRDDESMDSWPDRDELLGDWKEAFTGEITNSHGVLEAEADFSKPRVIGQATKRRKILQT

SEQ ID NO: 15002 - protein, 226 aa, BradyrhizobiumColbertium
MIRFYFNLSPNPTKVALFLEEAGLTYQPVPIDTRKGEQFTPDFLAINPNGKVPAIEDDGVIVFDSNAILLYLAEKTGMFLPRPESRGALLSWLMFVASGVGPFSGQAVHFKHFAPEKVAYAHNRYQYEAMRHYTVLDGHLAHRRYMVDDNYSIVDMDVWGWARMIPFIVGEEAWTKLPNLKRLHDEVAARPAVARALELKNKFTFKPEMDDEARRHHFKHLALQVA

SEQ ID NO: 15003 - protein, 186 aa, BradyrhizobiumColbertium
METGFALHAKRVGDRAPDIVLPDAHGRPFDVGSLLQHGPVVVTFYRGGGCPYCNLELKAYQDLLPHIVAAGANLVAISPEKPDDSLDTAEKNALTFTVLSDAGQRIGKAFGLVYSFTDELRAVYTSLNIDIPERNATPDDWSLPLSATYVIGPDGRIMFADTSVDYRYRADPLDVLQVLQSRAAAE

SEQ ID NO: 15004 - protein, 51 aa, BradyrhizobiumColbertium
MESFESRLLAAGGFISISEASGHIVAFGEWVLRPACKARRPGWAAGRAAPP

SEQ ID NO: 15005 - protein, 297 aa, BradyrhizobiumColbertium
MRASSTLPPLHALRAFEAVGRLLSFRRAGEELLITQSAVSHHIRQLEGTLGIQLFERKARTVALTPAGERYHEVVTRAFAGLAEGTAELTSSRVRQTVRVSLLPSFAANWLAPRLTRFRVAHPTVDLELDPTLRLADLNASEADLALRYGDGRWPGVRAELLIAEQLTPVLSPVLAAVRPLIEPTDVLAFPLLLTRRPFDWDIWAEAVGLDLRSAQTIRLTDYNIVLQAAIDGQGVALGRKTLVDDRLRTGALVAPCPRIISSPLAGHWLLTPERRRLTSGARAFVDWIRSETRDHP

SEQ ID NO: 15006 - protein, 408 aa, BradyrhizobiumColbertium
MTVGHTSLDVAVLRAATPGAEMVAHFNHAGASLMSETTLAAITDHLQREALYRPHEAAAEVQGRIEQARADAATLVGATPEEIAFTSSGSAGWGLTFAALPPLRAGDRILVGRHEWGGNLAPMRSAADYVGAQVEVIPCHEDGTVDPEALAAMLDRRARLVSLTWLPANGGLINDAAAIGRVTRAAAVPYFIDAGQALGQLPVDVKALGCDMLKGAGRKHLRGPRGTAILYVRRPFLGALQPGFLDVLSGSWVDGAPAPRNDARLFETSEIPVALLLGLGAALRQALALGVDAIRARIAGLAETLRARLADIPGVNVADLRSERSGLVAFTVSGFEAQDVKAALGRRKINVGANGVAHTPLDMTARGLDGIVRASLHAFNTEDELDRLVAAAGAIAAAQPAVKLEIAS

SEQ ID NO: 15007 - protein, 144 aa, BradyrhizobiumColbertium
MTFDLVKPAVLAAAMLAMGAAHAGPAERTAAAENATLSEDAPVYFVIHQHITDEKRFDAYVAAVTPLIAARGAKLVAAGTPETIAGDSRFERTVVFLWPSQRVFRAFWTSPEYAEVQKLRAGAVEWNAQLVPALPEANTASTGR

SEQ ID NO: 15008 - protein, 122 aa, BradyrhizobiumColbertium
MSENPTEAAAIAAILARYAEAGRTGRAELVAQDFDPGARIRGRLHGALIDRNREEFLAFMAEAPAGGLRTELGFVDIAGDAAIARLECHDWNGVRYTDLLTLLRHDGVWRIVAKAFHAHADA

SEQ ID NO: 15009 - protein, 49 aa, BradyrhizobiumColbertium
MGRERPGTVKRLVGADHGRPFGRAWEGGCEDGGGRREDGEAGQEDGATV

SEQ ID NO: 15010 - protein, 281 aa, BradyrhizobiumColbertium
MHYVDEGPRDAEVILCLHGEPTWGYLFRKLIPPLSRDRRVVVPDHMGFGKSATPADRSYWLQDHVDNLEKLTLALDLKNVTLVMHDFGGPAGMALAARHPERIRRIVSVNGPTPFGQSDLVDRVTANVGVSPWFQWILKAEQDGVLEQVLGQLGYNVLSTLKLNGFETNALITPSWLRAYGARFQTPADALGPIGWAKGYATGAHHFETPISAAAQAIRSRPAMAIWGAADHTLHAKHFLPLFTAIFPKAPVHLLPGVGHYSPEDAPDTIVTLIDNFIRLT

SEQ ID NO: 15011 - protein, 297 aa, BradyrhizobiumColbertium
MQLVTLAQFLEIVRTGSIRKASEELNIAASALSRQVANLEHFVGAKLFERKADGMSLTVEGAAFLKYAQRTVRDIDLARSEIDEIRGLRRGRVRIHSVEGAIAGYVFPAISEFRGKYPGVTFEVVAAGNDLVIEALIRDTADIGIGFNPAPDINVRVCAKVTKEIVVVVSPYHPMAEKSELALSDLAGVEIAMLDASFGTRRLFDRALRNADLSIPFALTVNAIEIAKSFAKRNHGIAIVPAFAARYECEHGELVAVPLSEPSLKRATVALCVRRDRELPRAVAAFLKLLQDKVALL

SEQ ID NO: 15012 - protein, 408 aa, BradyrhizobiumColbertium
MIIDRRNFISASAAAVTLPFLPKAAMAENEIVIGGLHDMTGVIDLIGRPMAQLMEFAVHEINAAGGLLGRKLRLQAYDPQSNQQLYAQLAQKLAVQDKASVVHGGITSSSREVMRPALRRAKTLYFYNTLYEGGVCDRNEFTTGTTPAQTVANLVRYAMTRFGKRVYIVAADYNFGQISAAWVKKFVELARGEIVGTEFFPLDVDNFGLSISKIQTARPDFVMSILVGAAHLSFYRQWAAAGLIGKIPMASSTFGAGGVDFVILRPEECNGLVNCSTYVQGIDSPRNRQFLSALRQYFGDRTPVVAEISCTTYEGVWLWAKGVEKAGSVERTAVIEALESGLVLEGPSGTVTVDPLTHHCVRDVHIAELRDREWKVLETIRQVPPSDTSAVCDLKKDPNSTIQHNIRF

SEQ ID NO: 15013 - protein, 288 aa, BradyrhizobiumColbertium
MEYAVVLLIEMLGAVSGLFIISIGLAVIFGMMRVINIAHGEFVAVGAYATILSWKAGVNVWLAILLFAPLSGAILGVLVERFLIRFLYGRLFDSLLATWGLSLLLIGAITTLLGNTVEGMPSPLGSVSIGSYQLSLYTLFLTAVGVALILLSYSVLRFTSLGLIARGTMQNPEVAASLGVAPNQVYMVTFALGAGLAGLAGGVFAPVMAIVPTMGTAFVAKAFITVIGGPAAVVAGSAASSVLFGSIGNVATVVAGPVWGDAAMLLGAIVLLRALPEGITGRIWRSAQ

SEQ ID NO: 15014 - protein, 308 aa, BradyrhizobiumColbertium
MNVSLSIFALSLAYLWGYGGVLSFGHAAFFGLGGYAFAVVALNTLDAWMALGAAIMCSAVFAAGLGWFMFYGRLNHVYLSVVTMVASLILFKVMSHTAGPDYMIGRVALGGYNGITGLPGLYIPFAPDDALDDRALFRLSVAVLVVSYLLLKVLQSTSFGHLTIAIRENETRAALLGYNVRMHKVLVFSLCGGLAGLAGGMFASQQAFIDPNALALPLSAQCLVWVIIGGRGAMIGPVLASVVLQQITAKLSETTAMDSNLLLGGMLVISVLVLPGGLVAAFGHLVFRVADLIRRRAPWSRDKVGALT

SEQ ID NO: 15015 - protein, 215 aa, BradyrhizobiumColbertium
MVVQSGELRCLIGPNGAGKTTFFKCVAGLLRPTSGTVEVLGENVTEAESFMIARLGVGIKTQVPSLFGGLSVWENLWLAARKCGDRAAQRRGTQHALERVGITEISYNQVDRLSHGERQLVELAMVMASEPRLILLDEPAAGMAFDESLRLAEIIKELTRNAAIVVVEHDMRFMRALSGVATVFHQGAILLEGSLQDVLDHPVVRDVYLGRSVEA

SEQ ID NO: 15016 - protein, 50 aa, BradyrhizobiumColbertium
MDFLRAVTDRVLVMQKGSLIAELSPELLGDPVRSTAALGIVFGSKEGEKP

SEQ ID NO: 15017 - protein, 518 aa, BradyrhizobiumColbertium
MIVKPPTPVVLKETAAEIGLSLSDDDVRSFVGLMQGHFDAYNVVDALPDYLPEVRYPRTPGHQPPAEQNSHNAWYVKTDIVGAPEGLLKGKSIAIKDNVMVAGVPMMNGASILEGYVPDIDATLVTRLLDAGATIAGKAHCEYYCLTGNSHTGSKGPVHNPHRKGYSAGGSSSGSATLVALGEVDMAVGGDQGGSIRMPAAYSGVVGLKPTFGLVPYTGVMPIEPTVDHVGPMTRTVRDAALMLQVIAGPDGLDGRQALHQGVPKYSELLGSGVRDLKIAVVSEGFAWPNSEPDVDERVREAADLFRKLGATVEEVSIPMHRIGISLWVPIAIDGLTHTMMWGDAYGASRSELYVTGLMDHHRRWRERADELSESTKLFTLIGTYVRNRHGLRFYGKAMNLMRKLRAAYDSVLREYDLLLMPTVPLKATKLPEANATREEYMARAHEMLANCAPFDSTHHPSISVPCGFSEGLPVGLMLTGRHWQDATVLRAAYAFESAGGFELGSDADADRRRKEAV

SEQ ID NO: 15018 - protein, 202 aa, BradyrhizobiumColbertium
MPTAMERLIWGFGDGSTLPIFETPFGKVGSVICWENYMPLLRMTMYSKGIQIYCAPTAVDPDSWQSTMQHIALEGRCFVLSSCQYLTRGDCPPDYAAAQGENPGIVLMRGGSVIYSPMGEVLAGPNFDGPTILYADIDGGEIARAKFDFDVVGHYARPDIFRMQVDETPRNPVVHEMADPTRHGLSDGQGQNAVKSSEGLTA

SEQ ID NO: 15019 - protein, 325 aa, BradyrhizobiumColbertium
MAALAVLLVGGFCAFLMGFAANQGGTCAVAAAREVVERGRARLLAGFMLAASTGGMIYLPAAWACGGSAHVVGQVTIGLPLLAGAVLLGVGAMVNGACLLGSLWRLGNGEFRLLALPAGLAIGDAIVVRAFPALLPELQANAWERPGVGGALFVAAMLPLLITSRFWLRRREAPSASGRWHLSNAMVFIGLSGALLFLLQPSATYSDLVRRSIAPSMVTTVAGLGGYAAAALTVVGAMMSAIRVGAFRPRRPACAALGRTIAGGTLMAAGANLIPGGNDALLLAAIPGGSSSGTVAYAIMTTTVLGLVFILRQSAKIRKKVAARP

SEQ ID NO: 15020 - protein, 240 aa, BradyrhizobiumColbertium
MSAFGIALAFVAGLLTVLSPCVLPILPIVFGAAASQHRFGPVALALGVASAFALAGILLATLSASAGFDAERFKPAFGGLLVLFGLVLLVPTLQHGAERMLAPLAAIGARGADTVMARGLAGQFGLGVLMGLVWSPCVGPTLGAASVLASQGKELGIVWLVMMTFGIGAALPLLAIGLASRAFLTRFRASLIGGGQWARRLMGAGMTAVGLIVLAGLDRRLESLLLDFTPAVIINLTTQV

SEQ ID NO: 15021 - protein, 128 aa, BradyrhizobiumColbertium
MRFTTSVAFAALLFITAPAEAGPIQAYSSESFARAKAAGLPILIDVHADWCPTCRAQDPIILELSRDPAFEDLVILKLDFDSQVNERRALGVSQQSTLVVYRGKAERGRGTGVTDRGQIRALAATALK

SEQ ID NO: 15022 - protein, 422 aa, BradyrhizobiumColbertium
MIVGAGFGGLAAAKSLGRRRIGVTLIDRRNHHVFQPLLYQVATAALSPADIAAPIRTILKDYLTVHVRMDEVVGIDPAKGVVLTANGAEIPYSALVLATGAQHSYFGNHRWAAHASGIKTLDDAVHVRRDILLAMERAETMRQQDAVHRSLPITFAVVGGGPTGVEMAGAIAELARHAAAMDFRFISPTCVKVVIIESRERLLATFPPKLSSAAKASLEQLGVEVRLSARVTTIDGKGIEVNGERMLAAATIWAAGVQASPAARWLGVEPDRSGRVPVTAALEVPGLSNVFAIGDTAAVKDEGGRMVPGIAAAAKQQGQYVARAIAARLNGGQPPPFRYRHYGSLATIGRRHAVADFGWMHLQGFAAWLLWSTAHLYFLVGFRNRFIVGLNWIWNYLTFERGARLITGYDPTPPSASQAPKV

SEQ ID NO: 15023 - protein, 46 aa, BradyrhizobiumColbertium
MAIIAPIPTAKARTNNATKAVAVPNKGMKAEARLAVVTGVWRMTIS

SEQ ID NO: 15024 - protein, 668 aa, BradyrhizobiumColbertium
MPDIVNVLLCCVVAGAIWIPMGFGLAAVVMPRRLAYFTAPTIGWACHSIMVATLFRVLPMTATTICISILLGYGTSIWMLVRDANFRSIPIAFSGVFIVLLASAAVLAWMIAAAILPHADGSGVTFAGPIFDHSKVAIVDEFLRGGLPLTNPFFYKAGSSTSLPYYYLWHFSAAEIARLTGASAWEADVAMTWFTSFSSLHIVMGLAFWISRSYRACFGAIAVCTTASLRPYIGQLFNYDVAYDLTGYPTGFGGWLFQAAWAPQHIQSAGCSVVALLMIARVACNRYWTSVTLGLVVAAAYASSLWVGGIVLPIQLALAFIFMLKAGESTPIRLVWSLSLAAAIAVVFASPLIVEQVLAMSARQGGFPISFSSVMVLGDVIPEWSRPVLDPVAFYLVYLTVELQVCYVIGLPMLARLVAARSAHAGRSDQILVLAAAVVVSLLATGFLSSTVTANNDLGWRAVLPAILILVAISGAGLAAAIRQRVTIRRILMFAVFLLAAFQAVLVLSSNLFPTPTASGREFTGSIELWRDVRSVSSPLQRVVNNPDYLGEVTPWPVNISWALLSNRRSCYAARNLVEALVPLPRDELDEIDALFRRVFTKRPETGDLRRLAFEFGCEIAIVTVDDPIWPTDPFAENSAYELVVARRDRWRIYRRRNEAMPSSTAQP

SEQ ID NO: 15025 - protein, 38 aa, BradyrhizobiumColbertium
MYAQMVRGTFDFQGTCLLGTRLFGLFRGVDGRIVTDLS

SEQ ID NO: 15026 - protein, 291 aa, BradyrhizobiumColbertium
MRYQDIYPSEALLRSFDIVRPRAAELLNLEYFEAEPAAMPAAVFDQHHLLLNLKNEPHRVENWRGGAHRDFTFALNEIVLTPAGIESGWRWHAKSRVIVITIDPQRLRRFAEGELGVILSDRQLRDVPQAHDAELCHAGEVLLDALRQRGIGSEVMYESLARVFLVQLIQRYGEERTAALNFGAGFTAAQYKRVLDHVAEHYGQPLTIEDLARVAGMSTAHFSRLFKATVGDTPYQFLMDYRVEQARKLLGEPERALIDIALACGFADQPHFTRIFKRLTGQTPREFRQGR

SEQ ID NO: 15027 - protein, 318 aa, BradyrhizobiumColbertium
MKPLVFATAIAAAALAVPADAATSRPVTFDSGGERIVGELFLPDGYKEGDKLPAIVVTGAWMTVRQQMPAVYARQLADRGFAALTFDFRGWGESAGARRQFEDPKAKIADIKAAVAYLATRPEADSARIGGLGICASSGYMVTAAAETPAMMSVALVAPWLQDAEVVAATYGGAAGVAKLEAVGDAAESAYRKSGKQTFVPAASLTDDQAIMFKAPYYTEADRGMIPQWRNEADPAFWRGWLSFDAIQVAPRLRQPFFLVHSEAAAIPQGAHRFYTNLASPKHELWLDNVGQLDFYDRPAPVKTASDAVAAHFKATLK

SEQ ID NO: 15028 - protein, 312 aa, BradyrhizobiumColbertium
MSTTLAPQPVQAGSAAALTPDSAAIETVIRSIATLADRHDFDALSQLYADEVRLDYTSLSGGEPEVVSATELMNRWAGVLPGFDRTHHAISDVRVTAIEGGRATATASVVADHWLGPMHWQVRGRYDYELVRQDRDWRMTAHRFTVIGEEGSRDILGPTTEAAKAHPVAWVKRQQARKVVLDFLKGLEEKDMARVNGVWAEDAVQDMPYAPEGFPKKVVGRDALVRHYAEWPQNSGKARFTDEIVFYPTRDPSIVFAEYHGVSEIVPTGRVYDQRYGGLFHVENGKITMFREYFDPNVFAHAFGLNEGGRFN

SEQ ID NO: 15029 - protein, 181 aa, BradyrhizobiumColbertium
MFITRILAVSLVTFGLGVGAPARSQNSGPATTQGQAAQERANIQLIRDYYQAYATGDPEAVRPFLAPSVVWRIPGHHPLAGEKRGPDEVIAFFRGLARGKFKAEPVFFQAQGDLVVDVHRGWSNVGSGPEVDQVYALMFRIRGGRIVEAQNFVSDPSQSDAFYWAHFPLRPLPDRLAPEAR

SEQ ID NO: 15030 - protein, 198 aa, BradyrhizobiumColbertium
MPVLLRPVLTAFGLACLLSAASLQLSGAAFAQAKQQPAPGQQAAPAEQRAPALKQIALTDKQLDGVLAAQKDMDAITEKLPENTAPDQKVMAQLEDVAKKHGFASFDDYNNVVDNIGLVIGGFDPATKKYVGPEAVIKTQIAQVKADKKMPAKDKKEALDELNQALKTAPLQVENKGNIDLVAKYYDRLIAALGDEQN

SEQ ID NO: 15031 - protein, 362 aa, BradyrhizobiumColbertium
MERRKFLKAGGLGLAASAIAAPAVAQSMPEVKWRLAASWPKSLDTLYGGCEYFCKRVAEITDNRFLIQPFAAGEIVPGLQVLDAVSNGTVEMGNTALYYYWGKNPAFTFGTSLPFGLNTRQHISWLLWNGGQEMLNDLLKEHKAIGVPTGSTGAQMGGWFRKEIKTVDDLKGLKFRVGGFAGTIISKLGGVPQQIAAGDIYPALEKGTIDAAEWVGPYDDEKLGFVKVAKYYYYPGWWEGTGQGHNIMNLDKWNALPKHYQAAISAASLDTFTWVTGKYDSVNPPALKRLLSSGAILKPFPQEVLEACYSAANEIYADLAKSNPHFGKMYASLTAFRSESLAWMQVAELSFDTFMMRMRTRT

SEQ ID NO: 15032 - protein, 437 aa, BradyrhizobiumColbertium
MNLFRLLQARAAAGKPVRVALIGAGKFGSMFLAQVPHTPGLEVAVIVDIDRDRAREACRTVGWEPERIAATAFTDDGVRAIAGDAIDVVVEATGNPAAGIRHARAAIAAGKHIVMVNVEADVLAGPLLADEAREAGVVYSLAYGDQPALTAEMVDWARATGFRVVAAGKGTKYLPAYHDVTPDGVWQHYGLTAGEAQSAGMNPQMFNSFLDGTKSAIEMAAIANACDLDVPTDGLMFPPCGVDDLPHILRPRSRGGVLERPGLVEVVSSLERDGRPVFRDLRWGVYVVLEAPNDYAADCFRQYGLKTDGSGRYAAMYKPYHLIGLELNISVLSAALRGEPTGQPGGFRGDVAAVAKRELRAGEMLDGEGGYTVWGKLVPAAASLKAGALPIGLAHRVRLKRAVGHGAVLRWSDVEFDAGDETVKTRKAMEAAFAAQH

SEQ ID NO: 15033 - protein, 266 aa, BradyrhizobiumColbertium
MKLSQEQLEFFHREGWLFLPELFSQEEVDLLAREAVGIYDANRPEVWREKSGAPRTAFAAHLYNEAFGILGAHPRMIEPVEQVFGEPVYMHQFKINAKSAFTGDVWQWHQDYGTWKRDDGMPEPRAMNIAIFLDEVMPINGPLMLVPRSQNAGDLEASHDLATTSYPLWTLDEDTVTRLVKQGGIVAPTGKPGGMLMFHGNLVHGSSGNITPYPRKIVYLTLNAVSNHIRNPTRPDYIAHRDFTPIKTVADDALLRLARAPRQAAE

SEQ ID NO: 15034 - protein, 225 aa, BradyrhizobiumColbertium
MIPLDPLPNLIDQVYARILEAISDRTLRPGQRIRQNELADRLGVSRQPVSHALHLLHRQGLVAESGKRGFEVTQLDPSRIRQLYEVRGAIDALAARLAAERAGTDAAGRARLNGALAAGRSIDGDTTLADLIGLDVDFHRAIYQLAGNPVIEETIAPQWPHMRRSMATVLSELDYRGSAWAEHADIAGRILAGDADGAERAALAHAQTAGRMTEVRLRAADEAAA

SEQ ID NO: 15035 - protein, 285 aa, BradyrhizobiumColbertium
MTEQIFLAEQFEASRDHLRAVAYRMLGSRAEVDDAVQEAWLRVSRYDMSDVANLRGWLTTVVARICLDMLRARKSRRESPMGPHVPEPVDETREREAEMADSVGAALLVVLETLQPAERLAFVLHDMFAVPFEEIAPIVGRSVEASRQLASRARRRAQGAPVPETDLSRRRGILDAFLKASREGDFEGLLAVLDPDVVFRADQAAVRLGTLAEVRGAERVAQLYKGRAQAARTALVDGEIGVAVILGGQLRVALRVAFKGDRIAGIEALADLERIAALHVEVLEG

SEQ ID NO: 15036 - protein, 156 aa, BradyrhizobiumColbertium
METKAMHARMKHPVMVLPEAMNLLQSLGGLTKQGLPEKLLELVHLRASQINGCSVCVDMHPKTARKLGETDERLFAVSAWREAPYFTNPERAALALTEAVTRLADREDPVPDAIWDEAAKHFDERELATLILSIATINVWNRLNATIKMPVGVWKV

SEQ ID NO: 15037 - protein, 270 aa, BradyrhizobiumColbertium
MQSFRVNGYDMAYLEVGSGPPLVCVHGTLSDFRTWYPVLGPLSKNHLVISVSLRHFFPEHWDAVGDDYKMAQHVADTIAFIEQVRPAPVDLMGHSRGGHIAFRVAQTRPDLLRKLVLAEPGGDLDASLPPPEGTPAHPSLAARTVRSVEMIRGGDVEGALQNFYEGIEGDGSWRRVPAAAKQQLRDNALTFLGQVNEQRRPYTLGDAQAIRTQTLLIGGGATTGSLSVLWRVLATHIAGAKTAVIPNAGHWMFEQDPLGFAEVVSRFLAE

SEQ ID NO: 15038 - protein, 272 aa, BradyrhizobiumColbertium
MQSVHVNGYDMFYLDVGEDRGRPPLVCVHGSLNDFRVWGCVLGPLTQRHRVLAVSLRHFFPDHWDGVGDTYSIAQHVQDVIAFIEKLDLGPVDLMGHSRGGHISFRVAQQRPDLLRRLILAEPGGELDASLDPDYVGGPSPLLARFTASAEKIASGDIDGGLAVFVDTLEGAGTWPRLPAMVKQNLRDNAMTLIGQIRDNRPPFSKADAVSIKMPTLFILGARTKGLLPKVLHALAAHVPYSKTAIIPNATHPMFEQAPQKYSDVVLDFLAS

SEQ ID NO: 15039 - protein, 180 aa, BradyrhizobiumColbertium
MTDHHFALFDTRIGLCAIAWGPRGINGTQLPMGGEEKIRTRIHQRHAEATETEPTVEVQQAIDRIVKLLAGEPDDLTDILLDLDGVPEFNRGVYDIARAIPPGKTVTYGDIAKQLGGVQLSRDVGQALGRNPCPIVVPCHRVLAAGNKPGGFSANGGVVTKLKMLEIEGALVNHTPSLFD

SEQ ID NO: 15040 - protein, 514 aa, BradyrhizobiumColbertium
MTHPSVYAKTTPSKIAYQMAGTGKAITYRELDELSNQGAHLFRSLGLKAGDHIALLMENRLAFMEICWAAQRSGLYYTAISRYLKQDEIDYIIKDCGAKLVITTPKCADQIKGLIRGTPGEPIFYMMDEPLPGFRSYDKEAAAQPITPIADEVAGYDMLYSSGTTGRPKGIKKAFEGNRIDVPNAFLRVLCADMCGMNADSTYLSPAPLYHAAPLRFNMMAIVLGGTSIIMEHFDAEEFLRLVEKYKVTQSQLVPTMFVRMLKLPDEVRTKYDVSTLKGAIHAAAPCPIEVKAKMIEWWGPILIEYYAGSEGNGVTVCNSQQWLEHRGSVGRAVVGKIKILDENDEEQPVGEIGTVYFADAPAFTYHNDPEKTKKAYNAKGWSTLGDVGYLDKDGFLYLTDRKSYMIISGGVNIYPQETEDVLITHPDVADVAVFGAPNEEMGEEVKAVVQPHDLSRAGKELEADLIAYCKTRLSAIKCPRSIDFEAELPRTPTGKLVKRHLRDKYWPKTAAKI

SEQ ID NO: 15041 - protein, 390 aa, BradyrhizobiumColbertium
MAEAYIVAAARTAGGRKGGRLAGWHPADLAAKVLDELVDRTKVDPALVEDVIMGCVMQVGEQSNNVARNAVMASKLPESVPGTSIDRQCGSSQQALHFAAQAVMSGAMDVVIAAGVESMTRVPMGLSSQLPAKNGFGNYKSPGIEKKYPNIVFSQFTGAEMMAEKYGLSKDELDEYSYNSHQRAIAATQAGHFKKEIVPLEITRADGSKDTHHIDEGIRFDVSLDGIKGVKLIAENGKLSAASASQICDGASGVMVVNERGLKQLGVKPLARIHHMTMTGGDPVIMLDAPLHATKRALEKAGMKIGDIDLFEVNEAFASVPTAWLKTTGADPERLNVNGGAIALGHPLGGSGTKLMTTLVHALHQRGKRYGLQTMCEGGGMANVTIVERL

SEQ ID NO: 15042 - protein, 198 aa, BradyrhizobiumColbertium
MAASELMIERSSIEISLSDIAQKSGANAALVKYHFGNKDGLLLALLARDAATEMSNLEFLLAQPITSTAKLKLHIAGIIRAYHRFPYMNRLIHYLLHETSASSADEVSKFFVAPLLDFHRRLLAEGVSRGEFRQTDPVLFYTSLIGACDHLFFGRHAMSRATGVGPVTDEVCRQYIKHMETLICGGILTQAEEAAAAG

SEQ ID NO: 15043 - protein, 252 aa, BradyrhizobiumColbertium
MQLKDVAVLITGGGSGLGAATARAMAAKGAKIGVIDQSKENAEKVAAEVKGVALHADVTSEEQIKAAIAKAEAAHGVARVLMNCAGIGGSQRIVGRDGVYPLEKFARIINVNLIGTFNCLRLFAERLVTAEPIGEERGVIINTASVAAYEGQIGQIAYSASKGGVVGLTLPAARDLASQKIRVNTIAPGLFFTPLLMGLNEEARKSLGAQVPHPSRLGDANEYGMLAVHIVENPMLNGETIRLDGAIRMAPR

SEQ ID NO: 15044 - protein, 268 aa, BradyrhizobiumColbertium
MSQPLLIEHDDGVDRVTLNRPESLNALDHALIDALNDYFQGLQRNRDTRVVVLKGAGKNFCAGLDLKAAMARRAGQQEPPGVTESLDSQRRIADIVMLMRRCPQPIISLVQGAAAGGGFALALASDIRIATKSARMNCAFIKLGLGGCDIGTSYFLPRLVGVSVASELILTGRFIGAERAMAVGLVSEVVDEDKLDAAAEPYVEAMMMASPVGLRLSKECLNMSVDAGSLEAAIAMEDRNQVLCSRSEEFSEGIRAFLEKRKPVYIKR

SEQ ID NO: 15045 - protein, 623 aa, BradyrhizobiumColbertium
MSGSAAAVMTKPAFRKVEWLKRDIDVERRADGTVVLKSRIPLQVYEEHIPASLAKWARETPERIWLAQRGGPNREWRKVSYGDAKRIVDALTQALLDLKLEGRPVTILSGNSIEHALMTQAAMQARSPAAPVSPAYSLMSHDHLKLKYLFDLIKPAVVMVQDGPTFEKALKALDLSGVTVVHVARPCDGIKSVSFAELAATPVTADVEASIAQITPRTVGKLLFTSGSTGMPKAVINTQEMMCANAAMMMQVRPRDPSGPIPTMLDWMPWNHTMGGNAAFHPILVDGGTLYIDDGRPMPGQFEETLRNLREISPTYYANVPAGYAALAAAMEKDDALCRSFFKNLSIMAYGGARLPDDLYDRMQALAVKTTGERIVFYTGWGSTETAPTSTGTYWDTERVGLIGLPFPGVELKMVPCGSKYELRLRGVNVTPGYFGQPELTKKMFDDEGFYCIGDAGIFVDDSDPVQGIIFAGRVVEDFKLTTGTFVHVGSLRTDAIAAASPVVHDALVAGQDRAFIGLLAWPNLHACRQLVGNADMSFAEAVQHPEVIACFRRGLEAHNRECEGASSRIIARAMLMVEPPSIDGNELTDKGYINQRAGLERRAALVERLYADQPDQDVIVLK

SEQ ID NO: 15046 - protein, 375 aa, BradyrhizobiumColbertium
MNFDFSDDQKQLRDQARKFLTEKCSSKAVRVVLDGKAPYDKELWKGLAEMGFLGVAIPEEFGGAGAGHLELCVIAEEMGRANAPVPFSSTVYLAAEALLIAGSDAQKKKWLPAIASGEAIGTLALFEGKGNPSPKNVKLTAANGVLNGVKRPVADGAVADFAVVAARTASSGRDNDISLFLIDLKAGGVEVKSLTNLDPTRGQAEMTFKDCKAEPLGAVGEGWSILTQVLDRAAVLCAFEQVGGADRALEMGRDYALDRIAFGRQIGSFQAVKHMLADMYVSATLARSNSYYGAWALSTNAAELPEAAAAARISATQAFQHCAKNNIQVHGGMGFTWEFDCHMYYRRANAMALGLGSLSYWEDQLIDRMRKKNAA

SEQ ID NO: 15047 - protein, 415 aa, BradyrhizobiumColbertium
MNFDDTPQEAEFRATARAWIAANAPKQYEEELRKSSLGRTQLKSANILEVAKAWQKKKADAGWACLHWPKEYGGRGSSPIERVIWQQEEGPFGKLSQMFIIGHGMCGPTMMAFAREEHKRTYLPPLASGEKVWCQLFSEPAGGSDVAGLRTRAEKDGDDWVINGQKIWTSGAHYSDYGILLTRTDPTVPKHKGLTMFFLDMKSPGVEVRPIKQASGASDFNEVYFTNVRIPDHQRLGEVGDGWNVSLTTLMNERMSIGAGVATGFPELFEYCSSLMLDDGPAIEDRAVRSKLANWAVKASGLRYTSMRAISALSKGERPGPENSIGKLVAGSMIQDVATYALDLQGAAGVVSGPEDAEVAGRFQAMLLRAPGTRVEGGTDEIMRNIIAERVLGLPGDIRVDKDVPFNKIPTKGRG

SEQ ID NO: 15048 - protein, 414 aa, BradyrhizobiumColbertium
MNFDDTPQEAAFRETARKWIEANAPKELHAELSKSSLGRIRLANHDIVDVGKAWQKKKFEGNWACLHWPREYGGRGATPIEKVIWQQEEGVYGKLTQPFQIGEGMCGPTVMAFGSEDAKRRYLPKLASGEEIWCQLFSEPSAGSDVAGLRTRAEKKGDNWIVNGQKIWTSGAHYSDYGLLIARTDPNVPKHKGLTMFFLDMKSPGVEVRPIKQANGMQEFNEVYFTDVVIPDSQRLGAVGEGWNVSLTTLMNERMSIGARLATGVPEMFEFCSNLMLEDGLAIDDPAVRSKLATWAAKSNGLKYTSYRTISALSKGERPGPENSIGKLVSGMMLQDIATYAMDLQGAAGVLTGNDEETVQGQFQQMLLSAPSMRIAGGTDEILRNIIAERVLGLPGDIRVDKDVPYNKIPTKGR

SEQ ID NO: 15049 - protein, 237 aa, BradyrhizobiumColbertium
MDAKGPNANYSTEDRIGVLEELLNERYSVRAFLAKEVDRAIIEHVLTTAQRTASWCNSQPWQVVIASGEAKERFRKAIYAEASKGLGDDYDFTPPREYVGIYLERRRESGFQLYNTLGIARGDKMAYAKQALENYNFFGAPHVAVIHTNEPLGIYGAIDCGAYVSNFMLAAQALGLGTIPQAALARHSGLIRRHFNLSDDRRVVCGISFGYADNAHKVNSYRTSRASLGETVTFVDV

SEQ ID NO: 15050 - protein, 182 aa, BradyrhizobiumColbertium
MPLTDSLRNDILAAVPSLRAFAISLSGNADRADDLVQETLLRALANIDSFQPGSNLPAWLFTILRNLFRSDYRKRRREVEDAEGNYAKTLKTQPSQNAHLEFEEFRTALDKLPQDQREALILVGASGFSYEDAASICGCAVGTIKSRVNRARSKLAALLYVDGAEDFGPDETVRAVIGGSGG

SEQ ID NO: 15051 - protein, 256 aa, BradyrhizobiumColbertium
MLRRYARALTGSQASGDAYVAAMLEAMLGDPSVLDESHGPRAGLFRLFTQIWNSVSVNDDAEVTTLPMPPERRLSNITPLPRQAFLLLSLEGFSEEEVAFILGTDVAETRRLADAAGREMAAEIATDVLIIEDETFIAMDLESLVKNLGHNVVGVARTHADAVALAKNKRPGLILADIQLADGSSGLDAVNELLRTFEVPVVFITAYPERFLTGERPEPAFLISKPFQPAMVSAVASQALFFQRNSRNRTPKAPAA

SEQ ID NO: 15052 - protein, 199 aa, BradyrhizobiumColbertium
MDQRLLDRLTIRDLVENWAVWRDAGDWERFATVWHEEGWMSATWFQGPARDFMRVSQEGFAKGVRILHFLGGTSIDLAGARAIAQTKMTISQRALVHDVLCDVVCTGRFYDFLEKRQGRWGIVRRQPIYEKDRMDPVDPAATLRLDQQALAVLPEGYRHLAYMQELIGYKVKRDMPGLTGPEVEKLYDEGRAWLARPAE

SEQ ID NO: 15053 - protein, 140 aa, BradyrhizobiumColbertium
MSQIQKVFLGAVAIVATLGAVQLASGHDLADRWQAVADIPSHSSISAPSQNVNRAAKADRLAGLKPAPVATRTVSMRLNDLAETSVLLRVPATIETGNAKPPLLLQNQKKVRSKPTIACEPMVSSLTEVAKLLQPGRCVT

SEQ ID NO: 15054 - protein, 625 aa, BradyrhizobiumColbertium
MTTSDTAVHTQPFQAEVSELLHLMVHSVYSETDIFLRELISNASDACDKLRYEAIGSPALLGEGDALKIRIIPNKTAKTLTIADNGIGMERQELIDHLGTIARSGTKAFVSKLKEAKDGLGLIGQFGVGFYSAFMVAEKIVVISRRAGESDVWTWSSQGGSGFEIARASDEDAARVTRGTEIVLHLKDDAKKYLETYEIERIVTAYSDNILFPIELVPEEGEPRQINSASALWQRSKSELTAEDYKKAYHQIASAFDDPAMTLHYRAEGRYSYAVLLFAPSTKPFDLFEPNRKGRVKLYVRRVFITDDADLLPGYLRFVRGVVDSEDLPLNISREMLQNNPQLAQIRKAVATRVVSELESLAEKDPENFAKIWDAFGAVLKEGIYEDFERREKLLALSRFTTTSGEKRSLKQVIADFKPNQTEIYYLVGDSIERLKSNPRLEAATARGIEVLLLSDPVDAFWTSMPSEFDGKPLKSLSQGDLNLDLIPRIDDKDEAKKEEPAADEAATVAVIKAALGERVSDVKASTRLTSSASCLVADSQGPSRELERILAQQNRGMKTKPILEINLRHPLVTAVTKAQAGSKVVDDLSLLLLEQAQILDGELPEDPAAFAARLNRLVLQGLGA

SEQ ID NO: 15055 - protein, 108 aa, BradyrhizobiumColbertium
MTGIRAGAVFDSRIFSMRLPILTVTAIVTLFVAADASAQTYDPRYPVCMHVYTPGGFGGGGDYFDCSFTSLPQCRASASGRSASCDLNPYYAFDQPPPRPRKRQRQQY

SEQ ID NO: 15056 - protein, 57 aa, BradyrhizobiumColbertium
MHVYSGANGGGGEWYDCSFTSIPQCRATASGRAATCDLNPYYPVNAPPRHLRRGRSG

SEQ ID NO: 15057 - protein, 608 aa, BradyrhizobiumColbertium
MARENNSMTTAVIEQAKSARAPSASKIWLKAIELTARIETLPGRLFADVVDDWARRQPDRAALVTDIGALDYEGLSKRINRYARWARSVGLVKGDTVALIMPNGIDYLAAWLGISRVGSVVALLNTKLVGQSLAHCIDVAAPRHIIVAHDLSEVLESAKPHLKTQAKVWTHGDARGERAIDVALAVLDDGPLAPDEHGDVSIEDRALLIYTSGTTGLPKAASISHRRILNWGFWFAGLTGATPQDRLYNCLPLFHSVGGIVAPCSMLAAGGSVVIADKFSASNFWSDIVRHDCTLFQYIGELCRYLLKAPPSEYENRHRLRLVCGNGLRGDIWEDFQARFAIPRILEFYAATEGNFSLFNVEGQPGAIGRIPPLLAHRFPASLVKLDPDSGAPLRSDEGLCMACARGEAGEAIGRIGTADQGGGRFEGYTDADETEKKILRDVFAKGDAWFRTGDLMRMDDKGFFHFVDRIGDTFRWKGENVATSEVNDAVRDFTGVVDATTYGVSIPGADGRAGMSAIVVNEGFDITALPAHLALRLPAYARPVFIRISRELDATETFKQKKGVLARQGFDPSAISDPLFMLEPKSGAYVALDAEVNARINDGTIRL

SEQ ID NO: 15058 - protein, 81 aa, BradyrhizobiumColbertium
MSVRSKVIEAIQQIAKEQHVALPALSDDLSLHETGFDSLAFAILVARLEDETGVDPFTISGDAAFPATVGDFVRAYENVPA

SEQ ID NO: 15059 - protein, 460 aa, BradyrhizobiumColbertium
MSPREIFALRDHLGAELKGRTISDAHDVVSLTDILSHTVLGGRLRELSGRAVLLKLSAQLRSGLAMIELDGVARRMLLCPPDLNPAHLDALVADAGIDAVVTDEPDRWAGTGVPLVVTAQLPLQATARTRTERATEWLMLTSGTSGVPKIAGHTLEALTGAIVAEGPARGPAPVWATFYDIRRYGGLQIFLRAVLSGGSMVLSDPHEALTDHIARLNARGVSHISGTPSHWRKLLMSGSAAQFAPAYVRLSGEIADQAVLDGLKVAFPHASVGHAYASTEAGVGFAVNDGLEGFPADYLGNRNGVEMKVVDGSLRIRSTRTAHAYIGRNAAALTDDEGFVDTGDIVELRGDRYYFVGRRGGIINIGGLKVHPEEIEAVINRHPAVRMSRAKSRRSPITGGIVVADVILAEGTDPAHAKGIRDQILEQCRAQLASHKVPAVIRFVEALDVTPAGKLARTDA

SEQ ID NO: 15060 - protein, 240 aa, BradyrhizobiumColbertium
MHNILVTGGSRGIGLAIARRLAGAGFNVVAAARRESEELKSAIAESEGRLHFRSCDLAVIDAIPAFAKLVRDEFGPIYGLVNNAGLGTEGLLATMHNSEIEALVQLNVLSPIILTKYVARQMMADGAGRIINISSIIATTGYNGLSVYGATKAAATGFTRSLAREVGKLGITVNAIAPGFIDTELTHNLSDEGRKRIAGRSALRRLPETDDIARMVEYLLGEGGRNVTGTVFTVDAGNTA

SEQ ID NO: 15061 - protein, 41 aa, BradyrhizobiumColbertium
MTHQNSGSHGHEMYPQQFVRLVGCRDASLDSLRKRQEDKLH

SEQ ID NO: 15062 - protein, 105 aa, BradyrhizobiumColbertium
MKMPERLTAAVDAWAEAHGLTRSDAICKLIELGLKMTPPVVPPVHPTESSATRIEEIAVHEIEALLDPALPADERERRIRRLTEGPPEFSQQRIDLPKDSPKQRT

SEQ ID NO: 15063 - protein, 383 aa, BradyrhizobiumColbertium
MISGESFYRGIPVFRGFTSLMDPALYSPLPDDWSIGVADIVDSTRAIAAQRYKAVNMAGAAVIAAVTNALAGREFPFVFGGDGASFAVSPDDVELAREALAATATWVREDLDLTMRVALVPVSAIRAQALDVRVARFGPSANLSYAMFSGGGLAWAEAAMKRGEFAVEAAPAGTQPDLSGLSCRFEVIPASRGLILSLLVMPTRGADPRAFRKVIEDVIDLVELSPDGGRPVPPQGPPLKWPPQGVDFEARTKRGGSLLARRVSVLAYTLFAYLIMRFDLKAGGFMPGVYKRQVAENSDFRKYDDGLRMVIDCTVELERALTDRLAAAAREGIVRYGVHRQDAAMMTCFTPSLLRSDHVHFIDGARGGYASAATALKAMMAAS

SEQ ID NO: 15064 - protein, 463 aa, BradyrhizobiumColbertium
MNMTIDAPLDAVPPVAPVVSPIASLLTAPILPTLLRLAIPNMIAMVGSTLVAVAETSYIGRLGTIPLAAIALVFPFAMLTQMMSAGAMGGGVSSAISRALGAGNRDRAATLALHAAIIGLCGGLFFTVMMLVFGRSFFALLGGREQVLEEASSYSQVLFSGAVAIWLVNTLASVIRGTGDMRLPSMTLIGASVLQIALGGTLGLGLFGVPQFGMPGVASGQLIAFSCAAIFFLWYLLSGRSRLPLALRAFHFERAMFVDILKVGALACLSPLQTVLTILIFTKILATFGTETLAGYGIGSRLEFLLIPITFAFGIASVPMVGMAIGAGDVKRARRVAWTAAAASGLTIGLIGLAVALAPSLWVGLFTRDPGVTAAAHSYFHWAGPAFVFFGMGVSLYFSSQGAARVGGPVLASTVRLLMVAIGGVGLMTAQAPAWTLFALVGGAMVVFGLSTAASVAFVRWGK

SEQ ID NO: 15065 - protein, 175 aa, BradyrhizobiumColbertium
MSIEIDILNGDASWPIAEPLHQAVWGPHVIADKPWAHVKWANADLRVLIETPEDGLVCHVGIYFRTVTWNGQKVHIGGIGGVCTREDRRGRGYATIALDAAVHTIRANEAVRFALLFCEPHNFAFYEARSWLPFEGEVYCEQPEGRIRFTQMAPYVFNIVRAPTLGTIDLCGLPW

SEQ ID NO: 15066 - protein, 198 aa, BradyrhizobiumColbertium
MTFTLPPLPYAYDALGQYMSKETLEYHHDKHHQAYVTNGNNALKGTEWEGKSLEEIVKGSFGKNPAVFNNAGQHYNHIHFWSWMKPNGGGTKLPGKLEKKINEDLGGFEKFKADFQAAGIGQFGSGWCWLQVKNGKLEISKTPNGENPLVHGATPILGCDVWEHSYYIDYRNRRPDYLKAFVENLVNWEYVESLFEKA

SEQ ID NO: 15067 - protein, 180 aa, BradyrhizobiumColbertium
MRKPIGWSTIIIAVLVAVSAGLVWRRDGTDGVLDILTHDLSLFSGILPRVLAGCLLGAFISEILPHEKVSRSLGPKSGLMGLLIGTAFGAILPGGPFTAYPVASALLAVGADFGATIAMVVSWTLIGYGRAVAWEIPIMGTDFTLWRIVISLPLPVLAGALGRFVYVRMYPKPAIKDDET

SEQ ID NO: 15068 - protein, 166 aa, BradyrhizobiumColbertium
MSAALLIDILLWGSVLGVGLIAFRRGPPVFKASLREGAMDFINIVPRIALGVIGSGYIAAIIPQEVITGWLGPDSGWLGVATAVVAGAATPGGPVVGFSIGTVALKSGGGVPQVVAYVVAWALFAFQRVILWEIPFMPARFVWFRCAVSVPFPFVAAAVAMVIGKP

SEQ ID NO: 15069 - protein, 74 aa, BradyrhizobiumColbertium
MVPAASRADHHDHAHSHPHGYRHSHDHAHSHDEASPHPAQAAPWSILRMTMAGRLAAAVGVCAVLWGIVLLAMR

SEQ ID NO: 15070 - protein, 251 aa, BradyrhizobiumColbertium
MAALHFHNVTLGYDRHPAVHHLNGEIAQGALVAVIGPNGAGKSTLLRGIVGILKPLDGSIHLGGLDRRDIAYLPQSAEIDRSFPISVFDFVGTGLWRATSLFGGVGKAAREKILRALASVGLNGFENRPIGTLSGGQMQRVLFARVLLQDARLIVLDEPFNAIDSKTTADLLALVQRWHGEGRTVLAALHDMEMVRNHFAETLVLARGPVAWGPTAEVLTPENLLVAMRMCEAFDDSAAACAADDISSRAA

SEQ ID NO: 15071 - protein, 289 aa, BradyrhizobiumColbertium
MIYDVLIGPFTEFEFMRRALAAVIALALAGAPIGMFLMLRRMSLVGDAMAHAILPGAAVGFLLSGLNLFAMTAGGLIAGFAVAILAGVVARSTGLKEDASLATFYLASLALGVTIVSIKGTNIDLLHVLFGNILAMDDQTLLVVAINATITLLVLAVIYRPLVIESVDPLFLRTVSRAGGPAHLAFLALVFINLVNGFQALGTLLAVGLMILPAGIARFWSRDLTAMICIAVIAAAVSGYAGLVLSFQTRVPSGPAIILVATVIYVVSVLFGRVGGIVRQLFPGRHLEA

SEQ ID NO: 15072 - protein, 287 aa, BradyrhizobiumColbertium
MRFILLCTLLLIASPLQAAERLNVVASFSILADFVRNVGGDRINLTTLVGADGDVHVYTPTPSDAKRIADAKLVIVNGLGLEGWLPRLVQSAGSKAKVVTASAGITPLKLGAAADPHAWQSIPNAKIYVTDIANALAAAAPDDAEFFRAQASAYLEKLETLDREVRQAVVKIPPERRKVISTHDAFGYFSSEYGIRFIAPLGVSTETEPSARDIAAIISQIKAARIPAVFLENISDDRLIRRIAAETGAKVGGTLISDGLTGEKGLAPTYIDMVRHNIKALTSALDH

SEQ ID NO: 15073 - protein, 346 aa, BradyrhizobiumColbertium
MSEATSQKIPVTVLTGYLGAGKTTLLNRILSENHGKKYAVIVNEFGEIGIDNDLIIGADEEVFEMNNGCICCTVRGDLVRIMDGLMKRKGKFDAIIVETTGLADPAPVAQTFFVDEDVQKNARLDAVVTVADAKWLSDRLKDAPEAKNQIAFADVIVLNKTDLVTKGELAEVEARIRGINPYAKLHRTERCSVALSDVLDRGAFDLDRILDIEPDFLEADDHDHDHHHGHAHDHHHDHGHGLKHYHDEEMQSLSLKTDKPLDPNVFMPWLQNLVQVEGGKILRSKGILAFQDDDDRYVFQGVHMMLEGNHQRKWKEGEPRESRLVFIGRELPEEAIRKGFESCIVS

SEQ ID NO: 15074 - protein, 340 aa, BradyrhizobiumColbertium
MMKEFAPAPDSASIVSVTDRVKPIGLGMAVTSVHFLGGRAAFVGGEENVAFVDSKGETTTVAVHSGGILSTASDGKRLVMGGDDGKVVSLDAKGEATLLATDPKRRWIDAVALHADGTFAWSAGKTATVKSGKAEEKSIEVPSTVGGLAFAPKGLRLAIAHYNGVTLWFPNMAGSAEFLPWAGSHHAVTFSPDNKFLVTAMHEPALHGWRLADNRHMRMTGYPGRVRSMSWSAGGKGLATSGADTVIVWPFGSKDGPMGKEPAMLAPLQARVSVVACHPKNDILAAGYSDGTVLMLRLEDGAEILVRRNGTPPVAALGWNAKGTLLAFADENGDGGLLEL

SEQ ID NO: 15075 - protein, 238 aa, BradyrhizobiumColbertium
MRFLTTFQLADFADTLASLTTAFVLGTLIGAERQYRQRTAGLRTNVLVAVGAAAFVDLAMNLAGADGAVRVIAYVVSGIGFLGAGVIMKQGMDVRGLNTAATLWASAAVGSCAGADMIAQASALTVFVIAGNTMLRPLVNAINRIPLNEKALEATYYFKLAVAADALPDMRDRLVEKLETAKYSVADIDVAEIGDDVLEIAAKLVATAVDPNELNAVATDLQHLPGVRHATWEVSTTD

SEQ ID NO: 15076 - protein, 112 aa, BradyrhizobiumColbertium
MIDMAIQGDKRRLKLDLTIAGSLLAAGIVVAVMSLAQIRAENRMELAQATPPLQGTPSEDQNKPAEAKPGGDRPTTPAPEPARPDPQTQGAATKPALPPAPAEKIAPPLEKK

SEQ ID NO: 15077 - protein, 112 aa, BradyrhizobiumColbertium
MLLFGHDKNAYWYGSQLSIEETRRLAPYQNATGLQVTSAVLGGMVWALENPNEGIVEADEMDFDRLLEIQMPYLGPVKGFYTDWTPLTDRPGLFPEDIDTSDPWQFKNILVR

SEQ ID NO: 15078 - protein, 363 aa, BradyrhizobiumColbertium
MSPASQVYAKITGPIVMVGFGSIGKGTLPLIERHLDYDKSRITVLDPKDEGRKALCEKHNVRFIQKGLTKDNYREVLTPLLTEGGGQGFCVNLSVDTGSTDIMELCNELGALYIDTVNEPWLGFYFDASKGPEARSNYALREVTLAAKRARPAGSTTAVSCCGANPGMVSFFVKQALLNVAADLKLNAPKPKTKAEWADLMRQAGIKGIHIAERDTQRSKKPKEPDVFVNTWSVEGFLSEGVQPSELGWGTHEKWMPDNARTHEAGCGAAIYLMQPGANTRVRTWCPTRGAQYGFLVTHNESISISDYFPVRDASGRRYTGQPATTPIIRPTMPCCRCTRCSAAPGRCRRSTTSSTRTRSSTA

SEQ ID NO: 15079 - protein, 129 aa, BradyrhizobiumColbertium
MSRRLISTGSPFEKTAGYSRAVIDGEFAFVAGTTGYDYTTMTMPADVTSQSRNCFKTIEAALKEGGFEMADIVRATYYVTDTSYIDVHFAVCGEVLGDIRPAATLLVVSALAKPEMKVEIEVTAKRRSI

SEQ ID NO: 15080 - protein, 177 aa, BradyrhizobiumColbertium
MIRAERAADVAMREALLDACFGENRHGRTCQRLRDGRAPAAGLALSAVREGKLVGTVRLWHVSAGGRPALVLGPLAVDPACRELGIGAALMHQALAAARARGHAAVILLGDAPYYARFGFSTEKTGALSLPGPFERDRLLAIEFAEGALDGCVGMIVPTGAALPKRRAVRAPEARAA

SEQ ID NO: 15081 - protein, 380 aa, BradyrhizobiumColbertium
MTERIQEFLRNRRKDGLDTEPCLVVDLEVVRDNYQSFAKALPDSRVFYAVKANPAPEVLSLLASMGSCFDTATVAEIEMALAAGATPDRISFGNTIKKERDIARAFTLGIRLFAVDCAAEVEKVARAAPGAKVFCRILYDCAGAEWPLSRKFGCDPEMAVEVLDLAKRLGLEPCGISFHVGSQQRKVKAWDRALAMASQVFRDCAERGINLSMVNMGGGFPTKYLKDVPPVVTYGRSIFRALRKHFGNQIPETIIEPGRGMVGNAGVIESEVVLISKKSDEDEVRWVYLDIGKFGGLAETMDESIRYAIRTRHDGADMTPCVLAGPTCDSADVLYEKNPYPLPVTLEIGDKVLIEGTGAYTSTYSSVAFNGIPPLKTYHI

SEQ ID NO: 15082 - protein, 84 aa, BradyrhizobiumColbertium
MNAPASSSRQIAWPSVITVISAAILIGAEVFGAAFAGGWALAILFGLGDQGAHILQAVLFALGVLVMTAFVRAAQRIEPFTKRR

SEQ ID NO: 15083 - protein, 694 aa, BradyrhizobiumColbertium
MMSESRQITDAETNPLLKAWVTPFAAPPFDEIKPEHFLPAFEQAFADHAAEIAAITNDPAAPDFANTITALERSGKLLSKVAAVFYDLVSAHSNPAILEIDKEVSLRMARHWNPIMMNAVLFGRIAQLHENRANLGLTPEQLRLLERTYTRFHRAGAGLSEEAKTRMAEINERLAQLGTSFSHHLLGDEQDWIMELGEGDRQGLPENFVAAAKAAAEERGLAGKAIVTLSRSSVEQFLKSSARRDLREKVYKAFIARGDNGNANDNNETIVEILKLREESAKLLGYPTFAAYRLEDSMAKTPEAVRGLLERVWKPARARALADRDEMQALITEEGGNFKLAPWDWRFYAEKLRLQRANFDDAAIKPYLALDNMIAAAFDCATRLFGVTFEERKDVPVWHPDVRVWEMKGPDGKHKALFYGDYFARPSKRSGAWMTSLRDQQKLDGDVAPLVLNICNFAKGAGGEPSLLSPDDARTLFHEFGHGLHGMLSNVTYPSLSGTSVFTDFVELPSQLYEHWQERPEVLQKFARHYQTGEPLPDELLQRFLAARKFNQGFATVEFVSSALIDLEFHTQPAAAAQDVRAFERRELEKIGMPEEIALRHRPTQFGHIFTGDHYAAGYYSYMWSEVMDADAFGAFEEAGDIFDPKVARRLHDDIYSSGGSVDPEAAYEAFRGRPPEPDALLRRRGLLDDAKAA

SEQ ID NO: 15084 - protein, 210 aa, BradyrhizobiumColbertium
MRALFGCLLAAAMTLAAGAANAHPHVWITATSELLYAADGSITGVRHAWTFDDMFSAYAVQGLESKTKGTYTREELGPLAQTNVESLKEYAYFTFARADGKKERFQEPVDYFLDYKDTVLTLHFTLPLKAPVKPKQLVLEVFDRSFFIDFKMAKDNPVKLVGAPSGCQMKLDRPNDGTASAQQLNEQTFLNGENSNFGMMFANKITVDCP

SEQ ID NO: 15085 - protein, 377 aa, BradyrhizobiumColbertium
MKPQLSPLARGLLACAAVLLVVGVADAALHHLLAQTPFGAPRPAQAADSEAGGLIGWLLAKQSEFYRQMSATIRAAKSDGSAVWTLLFISFAYGIFHAAGPGHGKAVIASYLVANRETARRGIALSFASALMQSLVAILVVGISAWVLNATAKTMCKAEAVIEIASYALIAAFGLRLVWVKGGAFIRALQVAQPVPAIAGVPHDHDHGHHHHHDAHDHDGHDHHRHDQGHAHAHHHHAHHHGNDHVHDEHCGHSHGPTPSELAGPGGWRRGFAAILTVGIRPCSGAILVLVFALAQGLFWAGIAATFLMGLGTAITVAAIAVVAVSAKDIAARLSAGRDGGGALFMRGIEFAAAGFVLLFGVGLLFGYIAAERTTCF

SEQ ID NO: 15086 - protein, 145 aa, BradyrhizobiumColbertium
MSREDFWFFHPFRVRYSEIDGQGVVFNAHYLTYFDTAITGYFRALGFDQYADAQASGIDFHVVKSVIEYKAPVRFDWELDVGVRVARIGNSSLVFELAIFLKGGADALVTGEIVWVYTDQKTHRPVTIPASMRSLIATRERHLTA

SEQ ID NO: 15087 - protein, 132 aa, BradyrhizobiumColbertium
MTLAEWCVFGALLLYLVTIASIKWIRFGRFDNSRPRDPAFYEDAIAQRALGAHQNGIEAFPFFAFAVLLAEFRDAPQRLIDELAALFLIVRIAYVLTYLGNRPTLRSILWSVGFAINLGIFFLPALKRFLPV

SEQ ID NO: 15088 - protein, 345 aa, BradyrhizobiumColbertium
MNSVAPPETAKPVTRSALPRVGVLLVNLGTPDTADAPGVRVYLKEFLSDARVIEDQGLIWKVVLNGIILRSRPRTKALDYQKIWNNEQNESPLKTITRSQAVKLAAALADRDHVVVDWAMRYGNPSIKAGIDALIAKGCERILAVPLYPQYSASTSATVCDEVFRVLAQLRNQPTLRVTPPYYEDSAYIEALATSIEAHLATLSFKPELIVASFHGMPKAYVDKGDPYRQHCIATTEALRRRLGMDETKLLLTFQSRFGNDEWLQPYTDKTMERLAKEGVRRIAVVTPGFSADCLETLEEIAQENAEIFKHNGGEQFSAIPCLNDSDPGMDVIRTLVLRELQGWI

SEQ ID NO: 15089 - protein, 325 aa, BradyrhizobiumColbertium
MNRRSCLAFLGMIAALPASAPAQQRNVVRRLGVLSVTAAEDAIGQARSTILAEALAGYGWKERDNLRIEWRSGGADRARIAQLADELIALKPDILLAVGTPSVEELRRRTTTIPIVFAVVTDPVSQGFVENLAHPGGNITGFTDYDGPLAGKWLEMLTQVTPSVRRVFVVYNPATAPFAPLMLRTIEGAARTLHVMVEPAPVHDAASIGALASRKDGAILVLPDFFTLANRVQLLATIAQARVPAVFWSRTFVDEGGLMSYSTDTAEQLRQAASYVDRILRGAQAADLPVQNPTKLELVINLKTARAFGVTLAPALVALANDVIE

SEQ ID NO: 15090 - protein, 332 aa, BradyrhizobiumColbertium
MSGFDIFAIVLVLLVIVTLVAGVKTVPQGYDWTIERFGKYTQTLSPGLNLIVPYFDRVGRKVNMMEQVIDIPEQEVITKDNATVTVDGVAFYQVFDAAKASYEVANLTQAITVLTMTNIRSVMGSMDLDQVLSHRDEINERLLRVVDAAVSPWGVKVNRIEIKDIVPPADLVEAMGRQMKAERVKRADILAAEGQRQSEILRAEGAKQGQILQAEGRREAAFRDAEARERSAEAEAKATQMVSEAIAKGDVAALNYFIADKYIKAFGQFAEAPNQKIIMLPMEATSMLGSLAGIGEIAKATFGEAAAAAAARRPGSVPPTGSTPPAVPPRQG

SEQ ID NO: 15091 - protein, 147 aa, BradyrhizobiumColbertium
MTDMFVSLGNWNWLILGFILMALEVLAPGIFLFWLGLAALLVGLISFALAVSWQIQLVMFAVFAAAAVPVWRRLARPKPDANASPFLNKRTEALLGREFTLEKPIIDGSGTVRIDDTVWRVAGPDTPAGTRVRVVQVDGANLTVAVT

SEQ ID NO: 15092 - protein, 114 aa, BradyrhizobiumColbertium
MTQEAAMAKEADSKTRSVRGSRTGRPIMALLDLLGRRWSLRILWELRDEPLTSRALRAACDEASPTVLQARLTELREAGFVELGDGGGYGLTPLGQELCETFVPLHRFAERWRK

SEQ ID NO: 15093 - protein, 185 aa, BradyrhizobiumColbertium
MSPFAPRIAPLAPPYPLEIQAQFERIMHGAPPLMLFRVMAGHGRAWDKFRAGGLLDPGPLSLRQREIVIDRTCALNRCEYEWGVHVAIFAGPAKLNEEEVRATVLGDAMSPCWSPSEQALVAAVDALHRRATLDDEEFAALSAHYDEAQILEIMLLCGFYRTVSYLANGLRLPLEEKAARFPTPL

SEQ ID NO: 15094 - protein, 346 aa, BradyrhizobiumColbertium
MGESPSSLDQTMPSSKALMTASSGPIPTSVESALRTLETESGGINALAAALRGPLGETFARAVELIRNAKGRVIVTGLGKSGHMGRKIAATLASTGTPAFFVHAAEAGHGDLGMITPDDVIMALSWSGEQPEMKNLVNYSARFAIPMIAVTSNGSSSLGQAADLVIELPKAREACPHNLAPTTSTLMQAAIGDALAIALLEGRGFTALEFAHFHPGGKLGAMLKFVRDYMRTGTEIPIKPEGTKMSEAVVEMSAKGLGCVCIINDAGEAVGIITDGDLRRHMRPDLLTATVDEIMTRQPKTVPPSMLATEMIEVLNTRKITTLLVTEAGKVVGIVHLHDLLRAGVA

SEQ ID NO: 15095 - protein, 567 aa, BradyrhizobiumColbertium
MLRAVLPCLALTALGSGSAAAQSLTPDLFNPNRGGFASPDTLPTRRTAGVPQAPSDALPALPDPNADPLKARQRPAASRVGQVPTYGLPAATGASSSAYDSLNRKRQQPKLYPGQPKPKRPAGPGSPAPSVAPPASTLGPPRIAPPPSASANRAPVPAAMAGTVPGQPLRRRLRADDDAFGAIGDYAGSFLIKGGLELSAGYDTNPTRLNRPVGSPAYVIAPDLLVMSDWERHALVADLRGSFSGYTNDMPASINGFASPSPVEANRPDFTGHVDGRLDVTRDFKLLSQLRLRLATDNPGSPNVQAGLQRYPVYAAYGTTIGFDQTFNRFQVAAGATIDRTAYTDSKLTDGTTFPNTDRDFNQYGGVGRFSYDLKPGLKPFVEIQGDTRVHDQAADRNGYFRDSNGGYAKVGSSFEFSRILTGEISIGYSARNYTDPRLSQLAGFLTTGSLIWSASGLTTVKFFTDTQIAETTIPGSSGVLVRTYAAEVDHDFRRWLTAVGKFTYGTLDYQGQNRNDKTYSFESNLIYKLNRNIWVKGTLRHDILDSNVAGSSSQGTVMLVGVRLQN

SEQ ID NO: 15096 - protein, 88 aa, BradyrhizobiumColbertium
MAARITLDINSAGEFELWLNPGGRDLLVKQLLALSETNEHFHLMPSEVPSDVEVSTRPYRPNDKLLEYGKVLFRLDEWDAQHFPRVLG

SEQ ID NO: 15097 - protein, 483 aa, BradyrhizobiumColbertium
MGKITGFLEIERHDRKYTPVAERVKHYKEFVVPLSEKEVRDQAARCMNCGIPYCHGTGSVAPGTPGCPVNNQIPDWNDLVYQGNWEEASRNLHSTNNFPEFTGRICPAPCEASCTLNIDDNPVTIKTIECAIVDRAWDNGWLTPEIAAHKTGKKVAVIGSGPAGMACAQQLARAGHDVHVFEKYAKAGGLLRYGIPDFKMEKGVIDRRVAQMEAEGVTFHYNSHVGTEGNVDPREMLNEYDAIALTGGAEAPRDLPIPGRELSGIHYAMDFLPQQNRRVSEEPLGGVQEILANGKHVVVIGGGDTGSDCIGTSLRQGALSVTQLEIMPSPPERENKGLTWPYWPLKMRTSSSQAEGAVREFAVLTQKFSGENGKVKKLHCVRVDDKFKPIAGTEFELDADLVLLAMGFVHPVHEGLLKLLAVELDPRGNVKANTLDYQTSRPNVFSAGDMRRGQSLVVWAIREGRLCARSIDTFLMGKTDLPR

SEQ ID NO: 15098 - protein, 1577 aa, BradyrhizobiumColbertium
MNGSQFERANIVAEELSPTVASKTTDPIQEHNSRPKAEGLYDPSLEKDSCGVGFIANIKGKKSHEIVSDALSILCNLEHRGAVGADPRAGDGAGILVQIPHAFFSRKAGELGFSLPAPGEYAIGALFMPRETAWRNVIKSIIADQIKEEGLTLLGWRDVPTDNSSLGVTVKPTEPACMQVFIGRNGTAKTEDEFERRLYILRKSISQAIYQRRDRGLAGYYPCSMSCRTVIYKGMFLADQLGKYYPDLHEKDFESALALVHQRFSTNTFPAWSLAHPYRMIAHNGEINTLRGNVNWMAARQASVSSELYGKDINRLWPISYEGQSDTACFDNALEFLVQGGYSLPHAVMMMIPEAWAGNPLMDEKRRAFYEYHAALMEPWDGPAAIAFTDGRQIGATLDRNGLRPARYLVTKDDRIVMASEMGVLTIPEDQIITKWRLQPGKMLLVDLEQGRLIPDDEIKAELARSHPYKEWLERTQIVLEELPKVPTTGVRSNLSLLDRQQAFGYSQEDIAILMTPMAATGEEAAGSMGNDTPISALSDKAKPLFTYFKQNFAQVTNPPIDPIREELVMSLVSIIGPRPNLFDLQGMATTKRLEVRQPILTDADLEKIRSISEVAESHFKSRTLDTTFHSGLGAAGMDQVLDELCARAESAVREGVNIIILSDRMVGTDRVPIPSLLACAAVHHHLIRTGLRTSVGLVVESGEPREVHHFACLAGYGAEAINPYLAFETIIAMKDRLPGSLDDYEIVKRYIKSIGKGLLKVMSKMGISTYQSYCGAQIFDAVGLKADFVAKFFAGTHTRVEGVGLAEIAEEAVRRHADAFGEAQVYKNALDVGGEYAYRSRGEDHAWTAESVSLLQHAARGNSQERYRAFAKILNEQSERLLTLRGLFRIKSAEEEKRKPIPLDQVEPAKEIVKRFATGAMSFGSISREAHTTLAIAMNRIGGKSNTGEGGEEAERFKPMPNGDSMRSAIKQVASGRFGVTTEYLVNSDMMQIKMAQGAKPGEGGQLPGHKVDATIARVRHSTPGVGLISPPPHHDIYSIEDLAQLIYDLKNVNPAGDVSVKLVSEIGVGTVAAGVAKARADHVTIAGFEGGTGASPLTSIKHAGSPWEIGLAETHQTLVRERLRSRIVVQVDGGFRTGRDVVIGALLGADEFGFATAPLIAAGCIMMRKCHLNTCPVGVATQDPVLRKRFTGQPEHVINYFFFVAEEVREIMASLGFRTFNEMVGQVQLLDQTKLVAHWKAKGLDFSKLFVKQKEEKGQKIYHSERQNHHLEAVLDRTLIEKAQPALDRGAPVKIEATINSTNRSAGAMLSGAVAKIYGHAGLPHDTIHVSLKGTAGQAFGAWLAHGVTFELEGEGNDYVGKGLSGGKIIVKPPKNSAIVPEESIIVGNTVMYGAIEGECYFRGIAGERFAVRNSGAVAVVEGAGDHCCEYMTGGIVVVLGKTGRNFAAGMSGGVAYVLDEAGDFDKLCNLSMVELEPVLSEEMINAETYHASGDLEAHGRVDVFKNLLASDVERLHVLISRHAKATGSKRAADILANWKEWLPKFRKVMPVEYRRALRELAANADAEPKIAIGA

SEQ ID NO: 15099 - protein, 43 aa, BradyrhizobiumColbertium
MRPVHCSCPLRAASCLTAIFGAPWAYRGTRLWVTARPLRAAFS

SEQ ID NO: 15100 - protein, 77 aa, BradyrhizobiumColbertium
MLQNRGCATFGKRLIDLSGIGTFPRLCARQKFGKVMVRTGRLSQFCLPPRHRDCSENRCSRASARYQAKPFSGTKNA

SEQ ID NO: 15101 - protein, 58 aa, BradyrhizobiumColbertium
MVETLLSGPRMAAIFRFSRRGALSEGLIRSFICDFGARGAGTRRVCFKTGAAQLLESD

SEQ ID NO: 15102 - protein, 248 aa, BradyrhizobiumColbertium
MKFFTGCVAVATLMLAASAAQAQVPARGIAGGAVIAVSDFDGPYASPEVAPPPSPRYGYGYEERGSVPQLLPSTEVYAVLRDNGFLPLGIPRLRGSVYTIAVIDRRGEDGRLVIDARDGRVLRFMPAADAYGMAPAYDERAVAPYGPQSALPPPTVIRSGPPRPPGSIPHVASRAVPLPKAAPRRGETPVAAAKPEPAEAQARQALPSQQAAKAAEPVPQASAPTVGQAKPSATILPTQEMPAAQGLD

SEQ ID NO: 15103 - protein, 227 aa, BradyrhizobiumColbertium
MLVHGAWADGSSWSEVIPILQAAGLHVTAVQNPLSSLADSVDATKRALAEQDGPTVLAAHSWGGTVISQVGTDPKVTGLVYVAARAPDANEDFVALSKQFPTGPARAGVVERDGYTKLSEDAFLKYFANGVKPNQAKELYAVQWPTAASIHGGGVALQAELVRGVEERLHYQPRLRALPRQAHERHHDRARRRSPVPGVASEGYCELDPGSGGVPAELSRDCLMKGA

SEQ ID NO: 15104 - protein, 153 aa, BradyrhizobiumColbertium
MRTYDLTPFYRSTVGFDRLFNLLDQASSDGSPGYPPYNIERTGENAYRITVAVSGFAKDELSIVAKENTLTIKGEKVANENTKSEVLYRGIAARAFERAFQLADFVQVKDASLENGLLHVDLVREIPEAKKPRQIAINAGAKAQVIENSAQAA

SEQ ID NO: 15105 - protein, 315 aa, BradyrhizobiumColbertium
MTLVSIPANPVPENVVSGTIKTPDGVELRFARWAPPAGRKGTVCVFTGRSEQIEKYFETVRDLRDRGFAVAMIDWRGQGHSSRRLRDPRKGYVRDFADFEIDVETFVQQVVLPDCPPPFFALAHSMGGTVLLRVAHAGKRWFDRMVLSAPMIDLPGRTTSFPVRALLKTMRLLGQGGRYVPGGSDRLTGLDPFINNPLTSDPVRYARNAAILEEDPTLGLASPTVAWADTAFSAMHTFKRANYPSQIRQPILMLAASNDTVVSTAAIEEFAYHLRAGSHLVIAGAKHEILQEQDRYRSQFWAAFDAFVPGTPLFK

SEQ ID NO: 15106 - protein, 924 aa, BradyrhizobiumColbertium
MHHPASKPPLDPSIPVSPNNPCPFLRGLVGEGFVDGGTVPLNTLSQTIANATGETGLKKVSARIQVRCVALIANGFKHILKSIWSGAQLDALRGGPLDKHGAGSRILGVDGKVNEDEIARLASFGRTYIDPNTGSSEPGLNAAEIKTFMRDNLKRAGNAARWYYPLLMKFEWPILLKIMGKGKQDEERYLSVADVRTLFEERKFPERINQRILSQPLLSSCQLRFRWAAALTALVTGLGFAVLVAVAEFPNQVRAMLPQKGVLVNLLPPPLPTVPETKAAYWLEQNWSLKDRHWFHHASQGTATFPVPYEWFVALEQPRLHLFSKPGMIKDSAYLERFGFIPSPQTIQADTATLRRFGYANVYETAQVSDWSTRWTPAENVDGLPVGFARMNGVVDPATGRREDDMIGLTCAACHTGQIHYQGVDIRFDGGAAMTDLKKLELATGLSIAYTLYVPFRFQRFADRVLGPEASDTDRAALKQKLSTIGSFLIDWAKNYDKTIEGKKTWDGKQQQDTEEGFGRLDALNRIGNQVFSQDLAMSGVKGFEKNLHAQDAPVSYPAIWTVPWFKFAQYDASIEQPLIRNAGEALGVTALLNLSDAFPEDRLWRSSVNVRTLGWIEDMLRGPDPFKTADPVAGPKFGGLLAPKWPSHILGDAWKLKPDRVERGRAIYAEMCSGCHLPAVDTPAFWSSKRWEPSGDSKVLNAVTIPLDEIKTDPEQSLVLSKRIVDVPGFLKVNTADLQTWWQCEVPTASKSPNEMVYALGLMTVVDLAVRKWMDDENIPEAERGRMWNLARKNCLNPAPDPRYRARPLNGIWATAPYLHNGSVPSLYWLLKPQNERPQKFCMGRRDYDPETVGFAVTANESCRTGETEFSAIGSDGQPIRGNSVLGHSFELKQGEPKRAGVIGRIFKDDAERYDLIEYLKTL

SEQ ID NO: 15107 - protein, 598 aa, BradyrhizobiumColbertium
MERRLAAIVCADVAGYSRMMGSDEAGTHAAFKAHRAAIHPIILNHGGRVVKNTGDGFLLEFASIVGATEAALSMQTLMAERNRHLPADRAMQFRLGIHMGDVIADEDEVFGDDVNIAVRLESVASPGGFAISAKAYGEASKHLAMPLTDAGNHRFKNIKDAIGVFTWTPEGAPALAPELREASALSQQYRTAIVGVLPFANLSDAQDEYFSDGLTEDLIHALSLQSFYRVLSRNSTFIFKGKNTSTRLIAREIDATYLIQGSVRRAGAKIRVTAELIAPETGEQLWTGRYDRDIGDLFAMQDEITTNLSAAIATEIVRAEASAPARLSTDVSAWDRFLKGLSHYYRQTKEDLAAAVDLFREAIRLDPKLSIAHAYLGTIQIQSIQFGWVKGTREMWAEAMNLAETSVRLDPRSSFAFSILSWAHSLEGHHEAAMDAAKRAVALNPYDNGARGVLGICHFMIGEHREAIELFSMASQRDNSDPRYQWAALNAFSHYLLRQYDATLSWAREQLYINPNHMQALAIRAAALAQLGRSDEASEAAGVLMANYPSLNVDRHLRNFHWKRPEDIAHYREGLLKAGVPLSKLTLLQSDLKRAAES

SEQ ID NO: 15108 - protein, 210 aa, BradyrhizobiumColbertium
MLGIHEIGLFVLSGVLLNITPGPDSVYVIGRSMQMGWRGGAAAALGISCGCFVHVAGAAIGLSALLMASSTAFSILKLVGAAYLVVTGLQMLWSRPALVSAVDEPVRSSLRRVFLQGVFTNALNPKVALFFLAFLPQFVAADAPHKPLAFLTLGLIFIFTGTLWCLVLAASAARAAHRLRQSEGAIAWVNRALGGLFIYLGIRVAMLEAR

SEQ ID NO: 15109 - protein, 250 aa, BradyrhizobiumColbertium
MIDPLLILIAAVFLLAGFVKGVIGLGLPTVSMGLLAVSMAPSRAIAIVIVPAIVTNIWQTFVGPYLRDILRRLWPLMIGTVVGCWLNAGALTGPHARYGTIVLGILLVIYAVIGLNKFHFHVSPRNEKWVGGVVGVITGVISASTGVQVIPSMPFMQAIGMEKDELVQAIGVFFTTATLALAFNLTAVGLLTPANALPGAVGLAMAFAGMFLGQSVRARMPAEAFRRWFLIAMILLGLYLAGSALAQEFA

SEQ ID NO: 15110 - protein, 296 aa, BradyrhizobiumColbertium
MRFDLVDLQLFIAVADQRSITRGAERSHLALASASARIKGLEDALGVALLKRGRRGVELTAAGESLLDHARLVIHQIDAMRGDLAGFASGMRASVHFLANTSGLSEHLPKALAGFLRAHRDIAVDIEERESTDIAAAVTAGAADLGFAAEHALPDHIERFVFSEDRLTLVTSKRGPFADRRRIDFQEAGACDFVGLTSATALQMHISRHAARLGMRLHVRARLRDFDAICQMVAADVGVALVPEAAARRCARTMPLAMVRLRDAFANRRLVICARSFKALPKPAKMLVEHLRAEAV

SEQ ID NO: 15111 - protein, 260 aa, BradyrhizobiumColbertium
MTVIDFSAFIGRLATASGETILPFFRTSLSIDDKSKTRDFDPVTEADRAAEAVMRRLIKASFPQHGIVGEEFGNEREDADYVWVLDPIDGTKSFIGGFPIWGTLIALLHKGAPVYGMMHQPFIGERFSGDNGSANYKGPSGERRLQVRRCASLSEATSYTTSPLLMNESDRAVFGRIERAARLSRYGGDCYSYCMLAAGHVDLVVETELKPYDIAALIPIVTGAGGVVTTWEGEPAQGGGRIIAAGDARVHEEALKLLNQ

SEQ ID NO: 15112 - protein, 42 aa, BradyrhizobiumColbertium
MKLAFCLAQFVSDVQRCLDLLPGILDARSDCSFGHPGAKNRS

SEQ ID NO: 15113 - protein, 296 aa, BradyrhizobiumColbertium
MTRFDGETSPAFEIVEPAQWRAPVIFNSPHSGSTYPDEFLAASRIDLPTLRRSEDSFMDELIGHLSERGFPTVRVNFPRSYVDVNREPYELDPRMFTGRLPSFANTRSMRVAGGLGTIPRVVGDGQEIYRDRILVDEALGRIETLYKPYHRALRRLINKVHQMFGTVVLVDCHSMPSVGVSRDEPRRPDVVIGDRYGTSCTPLLPDCVEETMTGLGYSIGRNKPYAGGFITEHYGNPASGLHAVQLELNRAIYMDERRRERSARFAQVASDFGVLADVLATTIPFADLGPFQAAAE

SEQ ID NO: 15114 - protein, 119 aa, BradyrhizobiumColbertium
MPKILLAEDDNDMRRFLVKALENAGFQVSSHDNGMAAYQRLREEPFEMLLTDIVMPEMDGIELARRASELDPDIKIMFITGFAAVALNSDSDAPKNAKVLSKPVHLRELVSEVNKMLAA

SEQ ID NO: 15115 - protein, 490 aa, BradyrhizobiumColbertium
MLPALLLASRGRFAAASDDAFSPSTVRDLARMLAGKPYEAPDEKLPSALKDLDYDKYRSIRFLPERALWRGKNLPFEAQFFHRGFFYKNRVNIFEVVDGKATELKYRKTDFSFGEKIPAFEDIDLGFAGFRIHAPMNRPDYYDEVCAFLGASYFRAVAKGQTYGLSARGLSIDTGESKGEEFPLFKAFWLERPAPGASSLVIHALLDSKSCAASYRFTVRPGDTTVFDVEMSVYPRVEMQRAGLAPMTSMFFYGPNDRNDIDDFRPSVHDSDGLAIFNGKGESLWRPLSNPRDLQISTFQDLNPRGFGLMQRERDFSVYQDIESSFEKRPSLWMEPIGDWGEGGVMLFEIPTKEEVHDNIAAFWRPKGPLQAKGEHNYTYRLHWGPDSPKPHSLARFTRSGIGARGEDARLFVLDLLGDNLKGVDPAGVKGVVTAEKTEVKNIVTQPNPYTGGWRLSFQCQVKTEPIELRAFLTAGDKPLSEVWVYRWAP

SEQ ID NO: 15116 - protein, 705 aa, BradyrhizobiumColbertium
MGPVSRAQRPIAEDIAAQRLLPAEAPLPMAPGDLGKNRVRDRIPAPVTPAMAWRRGLILLSTAALTGGGGYEMYRVLQVGGVTVLEAMVLALFLVLLAWVAFSFASAMAGFFVLLVHRPGAFAPDGELPAIASRTAMLLPTYNEDPHRLTARLRAIIESLETTSRGKLFDWYVLSDSTDPDIWVAEEKAVLALRQAVGTRLYYRHRADNTARKAGNISEWITRFGGVYDFMIVLDADSLMSGQTIVRLVHAMESNPSAGLVQTLPMVVNARSLFSRVQQFAGRLYGPMIAAGVAWWHGSEGNYWGHNAIIRVKAFAEAAALPQLRGRKPFGGHILSHDFVEAALMRRAGWGIYMLPTLGGSYEEVPPSLLDFAARDRRWCQGNLQHLAVVPARGLHWVSRLHFVVGIGAYLTAPLWLLFLLLGMLISLQARFVRPEYFPKGFSLFPSWPAQDPVLAIWVFAATMGLLLLPKLLSLILVWMRGSVRRQFGGALRASAGLFAEIVVSALMAPVMMIFQSIAVVEILAGRDAGWQTQRRDDGTVERRELYRKYGVPTLCGVVMGASAYAVSLPLLLWMSPVIVGLLFAVPIGALSARPASGKLFVTPEEREPPAVLRRANELSASADLAIKPALVELRGDAALLAFHVAQLPPPRAARPETVDTNLAVGRAKVDASETFDQAAAHLSSREVFSILNDGSALSAVLDKR

SEQ ID NO: 15117 - protein, 64 aa, BradyrhizobiumColbertium
MGMERFQLQLIIILIAAIAMWWSSHPSSRTIEGCVQRGCLADYRNGFDPTLISEMSPYMRSEKW

SEQ ID NO: 15118 - protein, 657 aa, BradyrhizobiumColbertium
MPPAATSQDHSPDTRFVHQETEARSVTAFGNLKETIRLARRGKTGLAIERSGAIRDRASRRLAEWVILRSDDDGIDFQRYASFVRANPSWPSLDRFRRRAEARLWFEPHEPGTVLMFFSERKPLGALGKLALARALSERGDQAAARKYVRSAWHNGRLSAQSEAQVLARFGHLLSAADHRARMESRLYADDITGSLRAAKRLSATDRAIVKARAAVIQNASTSGALLDAVASAAGAEPAYLFTRIQWLRRKDRIAEAAQLLLSAKLRASVSDHADAWWVERRILVRRLLDDGKAQIAYRIARDAASPSRESLRVDQTFTAGWIALRFLNNPHLATQHFARIARMTTHPTSLARAAYWLGRAAEAGGDREKARGHYAAASRRTAAYYGQLASARLGRRDVSLPRPPSLGPRERANLSKRDLVRAVELLYATGNSDLVIPFVADLGRTADIGLLTVIAEAVAKRRDARATLAVGKGALARGFPLDLYAFPNFGLPNYASVGPKAAASLVYAVARAESAFDKGAQSPAKASGLMQVTPATGQTIARRLGIAFEPGRLRSDPAYNVQLGSAELADLLKTYDGNHVLVLVGYNAGRGRVKQWIARYGDPRDPTVDVIDWVERIPFTETRIYVQRVMENLQAYRSRFDERAPLGIEADMRGAH

SEQ ID NO: 15119 - protein, 357 aa, BradyrhizobiumColbertium
MLSPSTIAFACGLAAGAVLGIAGRAGRFCTLAMLEDAFFGSDYRRLKSFALAAAVALLATQALAEFGIVDLSRSIYLTASIGLGGAILGGLMFGVGMALVGTCGFGTLVRVGGGDLRAIVVFLVLGLSALATMRGITGVLRLMLIEPLSVRLPEGSTQTLTSLLGADGMMRAVLVVAIATALAFWALADGRLIRSPRLLAAGLAVGAAIAFGWFATGWIADDEFDAVRVSSLTFVAPLGDAILYIATFSGARLNFGIGSVVGVVAGSFAAAMLARGFRWEACDDARELKRHMTGALLMGIGGVMSMGCTIGQGLTAFSTLSLSAPITMLAIACGARLGLEFTMTGEWLPAVRKLFGT

SEQ ID NO: 15120 - protein, 116 aa, BradyrhizobiumColbertium
MPLPKLKEIEGSAELEQMIEKAREASDMLKALSHESRLLLLCILAEGEKSVTELEQFLGERQSTVSQQLARLRLDRLGTTRRDGKTIYYSLANEDVRKILTAVYDVFCEPVRRRRR

SEQ ID NO: 15121 - protein, 123 aa, BradyrhizobiumColbertium
MNRIIALLALAIGLALPATASRAAELVMFERPGCAWCARFNAEIAPIYGKTGEGRAAPLRRVDLNGSLPADLAGIDPGPFTPTFVVVQEGREIGRIRGYPGDAFFFGLLDRILSSTGSEPGRS

SEQ ID NO: 15122 - protein, 243 aa, BradyrhizobiumColbertium
MTLDVTLGAAFVAGLLSFLSPCILPLVPPFLCYMAGVSVTDLSGDRPDLRPRILLSALSFVAGFSLVFIALGSTASIAGRFVSAHLSTLGIAAGGLIIVMGLHFLGLLRIPLLYRSATVQVDNRPAGMAGAFVMGLAFAFGWTPCAGPILAAVLLMAGSEDTTGRGALLLLAYSVGTGIPFLIAAAFTGRFIGALGRVRRHLGLVEKTMGVFLVVTGLMFLTGLMPAVSQWLLEQFPALTSIG

SEQ ID NO: 15123 - protein, 239 aa, BradyrhizobiumColbertium
MRCTIALLAWLASNALALGADGDKPAYLVSAVAPIMANLRIAASYVRTGNVALAQIEIDEAASRWKRIEPNTRERPPVHASSESSGFLDRGYEQLTTAMGALDRGDNAAAERELLAVRRAFHALRRHAGLYDLGDCIFEIAPAMDALRVAATRYSERPAQANAEETVAAAGAFRDRLLRCNEWANGEIAAQGEFRRLIDGAIASSGEIAHAAMAGDGPLVHRYLIELQSFAQLLDFRFG

SEQ ID NO: 15124 - protein, 192 aa, BradyrhizobiumColbertium
MSLRMPTRRGLLAFAAGTALAGRGAAAAEPAVGEDGLYHEPWFLQSFLDLREDLESATAGGKRLAVMWELRGCPYCRETHLVNFADPGIASYIRANFEVLQLNLIGSRKVTDFDREELAEKDLARKYGIRFTPTVQFFPPSADGVEAKEAMAREVARAPGYLKPPHFLAMFRFVRERAYERGSFRDFLASNG

SEQ ID NO: 15125 - protein, 146 aa, BradyrhizobiumColbertium
MAAFALYVAAGGALAQEPVKEPIKLDVVDDSLPKSLIGAPGNAAAGKKVFLTRTLGNCLACHQVTSLKSEEFHGEFGPSLDGVAGRYTEAQLRLIVADPKRIFTDTVMPAFFKNDGLSRVRPEFVGKTILTAAQVEDVVAFLKTLN

SEQ ID NO: 15126 - protein, 150 aa, BradyrhizobiumColbertium
MKAINRRQAFALGGGFVMLTLVPMAAGAEVSNDAAKWIEKFTGGKQPAKGKISLDLPEIAENGNTVPLSINIESPMTAESYVKDVLIIADGNPNAGVATLSFTPLSGKAEASIRIRLATTQNVVAVAKMSDGSLFTEQKTVKVTIGGCGG

SEQ ID NO: 15127 - protein, 108 aa, BradyrhizobiumColbertium
MADKPRIKLPKEAAKGEVIQIKTLVSHLMESGQRKDAQGKPIPRKIINKFACEFNGRPVFSCALEPAISANPYIQFDARIDEAGTFKFAWTDDDGSVITAEEKIALKA

SEQ ID NO: 15128 - protein, 273 aa, BradyrhizobiumColbertium
MASRYVGFAAAIVAITSGATLVSADDAERKGIAAPPGHVFKTIISGYEFRSKETRALQDDDLENPGFLAVERAADAWKKAEGSEGKSCMSCHGEAQASMKGVGAAMPKWDDKLKKPVNLEQRINLCRSEQMKAEPWKFKSRELTDMTTFVRYQSHGMPVAVKIDGPISPWFERGKQIYYNRYGQLDLACASCHERNNGKFMRADFLSQGQTNGFPTYRLRDQRVVPLHERFEGCMFDVRAEPFKPLSDDFLALELYVAWRGIGLPVETPSVRN

SEQ ID NO: 15129 - protein, 563 aa, BradyrhizobiumColbertium
MISRREFIQVAAATAALSTGVGSGLTRAVAQQRLTQTELLAFEPLGNVTLVHVTDIHGQLMPLYFREPSTNLGAGDARGVPPHVTGREFLSRFGIAPGSSAAYALTSEDFEALAKTYGRIGGLDRAATVIKAIRAERGDKVALLDGGDTWQGSWSSLKTRGQDMIDCMALLKPDAMTGHWEFTYGTERVKQAIEGLGFPFLGLNIRDTEWNEAAFDAYTMIERGGVKIAVLGQAFPYTPVANPRWMIPNWSFGVREEDVQSQVDKARKGGAQLVVLLSHNGFDVDRKLASRVKGIDVILTGHTHDALPEAVKVGKTLLIASGSSGKFVSRLDLDVRDGEVKAFRYKLIPLFSDVITADAEMAAKIAEVRKPFASDLAKVLGRTESLLYRRGNFNGTFDDLICQALMQERDAEIALSPGFRWGTSVLPGQDITFEDVTNATAITYPAVYRMGMTGARLKEIIEDVADNLFNVDPYYQQGGDMVRIGGLSYAIDVTKPQGSRISDMQMVKTGTPIDPAREYQVAGWASVNEGTEGPPIWDVVSNYLTRQRAIRLEPNRAVKVTGA

SEQ ID NO: 15130 - protein, 423 aa, BradyrhizobiumColbertium
MSKMDSPRQSRRSFLAAGAGVAASVLAKPALAGGGNPANQPPNVPEWTKSLGEGVAVRPYGKPSKFEKDVVRRDVEWLTASRESSVSFTPLHELEGIITPNGLCFERHHGGIAEIDPVDHRLMIHGLVERPLILTLDELKRYPRVNRIHFMECAANSGMEWRGAQLNGCQFTHGMIHCVQYTGVSLRTLLDEAGVKTNGKWLLVEGADAAAMDRSLPIEKALDDCIIAYKMNGEALYPEQGYPMRLVVPGWQGNLWVKWLRRIKVGDQPWHTREETSKYTDLMPNGKARRFTWSMDAKSVITSPSPQAPIRHGKGFTIVSGLAWSGNGKVKRVDVSLDGGRNWWPARLDGPVLDKALTRFYYEFDWNGEPLLLQSRVQDDTGYVQPSKAELRKIRGVNSIYHNNGIQTWHVQANGEVENVEVA

SEQ ID NO: 15131 - protein, 221 aa, BradyrhizobiumColbertium
MAVALTACVLGAPALAGQRTDTKSGPRYHIGRAPTADEIRGWDIDVRPDGQGLPEGKGTVAQGEKLFMDNCASCHGEFGEGSGRWPVLAGGKGSLTSDNPVKTVGSYWPYASTLFDYIRHAMPYGNTGSLSVDEYYALVAYVLHLNDVITDQNFELTNRNLATIKMPNEQGFVMDDRATSEKSFWQKDPCMKDCIAPVKITGRAVAIDVTPEDGKKSRGVE

SEQ ID NO: 15132 - protein, 145 aa, BradyrhizobiumColbertium
MLLHASLVAGSLITIHPAAAEAAEPHRLALQISDDDQSKMRAVLDVAANVSRHYSGQGEDVELVVVAFNGGLDMLLEDRSPVKERLANFLKSMPNVSFIACGKTLETLAAKEGKQPRLIEGVSVTQVGVAALMDLAEKNWTIVRP

SEQ ID NO: 15133 - protein, 301 aa, BradyrhizobiumColbertium
MRWLVGLIALLALATSAGAAEQELELSLDGRTTLATLRTPSSMGPDTPLVVMTHGTLAHKDMEVIQGIAKALEQRGIASLAHTLSLGLDRRKGMYDCAARHDYVIEDAIAEIGAWVARARGMSRLVLAFGHSRGGNQVARYLAAGETPPVAGAVLLAPVTAKAEADLRASYAQTYGKPLEPLVELATKSISAGRGGEWMDVPGFIYCRNAMVTARALASFYGPDAGQDTAALVARVKPPVLVLVAAKDTVVPDVAASFASLAGSGGGRVQLDEIEDADHFFRDLFADDVADRIAEFIKRMR

SEQ ID NO: 15134 - protein, 363 aa, BradyrhizobiumColbertium
MLTPVIDFLGEDRLSWLGGLLVGGLFGFFAQRSRFCLRAAAVEFSRGEGGPRLAVWLLTFAAALVGTQALVAIGWLDVSEARQLAQQGSISGALAGGVMFGCGMVLARGCASRLLVLSANGNLRALLSGLVFAVTAQAAYRGLLSPAREWVTNLWLIDGGPSRDIMAVFGAGAPEKLAFGGLWLIAGLAFAFRSNLPRDLMLAALATGAAVVAGWLFTYQLAQASFAPVTLKSLTFSGPSAELLMLVLNSSQLRLGFDLGIVPGVFLGSFAAAARAGELKLEGFSDGLGMRRYLFGAVLMGFGAMLAGGCAVGAGVTGASVFALTAWLVLAGMWLGAGLTDLLVDGAGMPRPRRPAKSPTPGA

SEQ ID NO: 15135 - protein, 183 aa, BradyrhizobiumColbertium
MTTITESYVREAPRTARIDWSPYLVGAGIGLLSWVAFGVFGDPLGVTTAYSRIASLFAVPVIGPEAVAQNSYWKSMPLKWDYGVWFLVGIPFGAFVSAVISGTWRLELVPDVWKERFGPSVAKRFAAAFLGGIVIMYGARLAGGCTSGHGISGGLQLALSSWLFLAVMFATGLAVSALMFRAR

SEQ ID NO: 15136 - protein, 183 aa, BradyrhizobiumColbertium
MTAMMTILGPLVMGAAFGFLLQRGKVTSCNVIENQFRLRDFTVLKVMGTAIVVGGIGVLLLVDTGNTKYYVKDANMLAVALGAALFGVGMVVYGYCPGTALGAIATGSVHALVGALGMIAGAILYALSFDWLKANVLNVGALGKVRLPDVTGIPDVVWFAALAVGAGLFFWWIESTEARQKKG

SEQ ID NO: 15137 - protein, 105 aa, BradyrhizobiumColbertium
MRQLKTTELERQAKEVAALMRMLANEHRLLILCRLVEYGEIAASALADDVGLSPSALSQHLAKLKAEGVVAARRDGQTMWYRIADGRVEELFSTLHRLFCRPRKR

SEQ ID NO: 15138 - protein, 37 aa, BradyrhizobiumColbertium
MLPSLVDQGDAQAVAVSLPPLPTSSRRFRKYSSCERL

SEQ ID NO: 15139 - protein, 59 aa, BradyrhizobiumColbertium
MLLCADCALREEGSAVRLLWFTSGFAPTPGHSNPAAPGCTTAGDASRRDALQGTLDLLS

SEQ ID NO: 15140 - protein, 275 aa, BradyrhizobiumColbertium
MRILLLLGETESSLSAREFAFDLARPGGLLVSGLSGIDLSSLTVPMIGGIGASAHQAKLEEIRGRQARESNARLHASYAEACDARGVEFSWLSFEGDPPEAFRAASETRDLIVTGHDTTFSVDQAPSLPELLSNLLLLSPRPVVVCGDEYRRPRDVLVAYDGSLPAMRALQMYALLGLWREARVHVTSIAAESELATRRAHAAADFLRGHDVHCTVVPIEARVDPSEAIRIEVIDRDIGLLVMGAFGHRGWSNALFGSTTRRLVERPPCPLFLFH

SEQ ID NO: 15141 - protein, 37 aa, BradyrhizobiumColbertium
MPVQVRALHRFKIEQIEEAYGLCANQREDVLEVAISP

SEQ ID NO: 15142 - protein, 895 aa, BradyrhizobiumColbertium
MEAVLAALEAGASGLSASEAARRLSRYGPNRLPEPPRRSAILRFLSHFHNFLIYVLLGAAAITAALGHLVDSSVILAVVIANAVIGFIQEGRAEQAMDAIRQMLAPKSSVMRDGERHSIDSASVVPGDIVLLEAGERVPADLRLVEATGLRIEEAILTGESVPTEKETKPVASGAMIGDRSCMAFSGTLVAGGAGRGVAVATGASTEIGRISGMLSRVETLTTPLVRQMDGFARWLTILILMIGGVLLVYGYFVGHLPFAELFMSVVGLSVAAIPEGLPAVLTITLAVGVQAMARRNAIVRRLPAIETLGSVSVICSDKTGTLTRNEMMVTTLASADHIYSVAGDGYAPEGAIRLADADVDPAEHELLLEFARTCALCNDAALHSHDEGWKVEGDPMEGALKALAGKITRQGAAAFADWTRTDTIPFDARHRYMAVLHHDHEGHAWIHVKGAPERILAMCSVQRASDGSTHAIDADYWRKRMDDIAAHGQRVLALAARSTAPDHVVLNTADLDGHMVLVGLIGLIDPPRPEAIAAVAECHGAGIRVKMITGDHAGTAAAIARQVGLQHPGKVLTGADLEAMSDAELAAVVVDTDVYARTSPEHKLRLVTALQSHGLTVAMTGDGVNDAPALKRADAGIAMGQKGSEAAKEASDLVLADDNFASIAVAIREGRTVYDNIKKVISWTLPTNAGEATTIIAALFLGMALPVTAVQILWINLITGITLGVALAFEPTEEDTMKRAPRSRKEPLLTGALIWHIILVSVLFLAAVFGMYTYAIDKGHAPDLARTIALNTLVVLEIFHLFFIRNIYGTSLTLKAVRGTRVVWICVIAITLAQFAVTYLPPLQQVFGTQPVSFFDGMLIVAVGAVFFAVIEAEKQLRIVFQRTEQAPASQTTV

SEQ ID NO: 15143 - protein, 556 aa, BradyrhizobiumColbertium
MSWLPQLGLSVSLFADGLALFFAALILGIGLLIILYARFYLSRSDSMGRFFCYLLLFQGSMVGIVLSNNILLLVVFWELTSLTSFLLIGYWYHLPASRAGALMALVVTGAGGLALMGGMLLLGHSAGSFELTEILNRGEAIKASPLYLPALLLILLGAFTKSAQFPFHFWLPHAMAAPTPVSAYLHSATMVKAGVFLLARLWPVMSGTQEWFLIVSLTGLVTMVMAAWIALFKDDLKALLAFSTISHLGLLTMLLGFGTRMAVVAAVFHILNHATFKAALFMSAGIVDHEAGTRDIRRLGGLRHLMPITSGLAIVAAASMAGVPLLNGFLSKEMMLEEASHTIYAGQAWIFPLFATVGALLSAAYSARLIFHVFLGPQRSNYPRHPHDPSFGMWLPVAVLVIPVIAIGVVPATFAVPIELTARAVAHGTLPDFHLALWHGFTPALAMSSLALAGGLVLLWIYPSANRLRLAAPRADAMTMFMTSLAAVIWASRLALSSINGGGLPRYLSIIVGTISILALTGFLGAAPAPMAGGRAVLPATLPVVTAGWSCSWRAE

SEQ ID NO: 15144 - protein, 323 aa, BradyrhizobiumColbertium
MIVRCHYDRLTALIVTSIVGLVVSLAFLQFSAPDLALTQISVEVVTTILLLLAINLLPRTTPDESPLRAKLGAGGLAMVAGVGVAALAYAVMTRNFEPISGYHIEQSKPGGGGTNVVNVILVDFRGYDTFGEIIVLAIAALTIFALLDSAMQGAAGRRLARVRFDPQAHDPHPLMLTVVTRILLPLSLMVGAYILLRGHNMPGGGFIAGLIVAIAFLMQYMASGYVWAHRRARFDAHVMIGGGVLIAGATGLAALLFGRPFLTSTFGYFNLPVFGEVELASAMAFDIGVFFAVVGTCLLSLATLSRVEERAEQASNQMEARNP

SEQ ID NO: 15145 - protein, 125 aa, BradyrhizobiumColbertium
MSMEFLVATGIGALTAVGLYLILLRRTFPVVIGLSFLSYAVNVFLFAMGRLTIDLPPIVSRSAAGYTDPLPQALVLTAIVITFGMTALIVVLSLRAFLETGTDDVALHVRRDEESCGIPRDERFR

SEQ ID NO: 15146 - protein, 507 aa, BradyrhizobiumColbertium
MTDAWLIVPVAVPAMTAAMLVLAMRHSLAGQRILSAAATACQLAVAIGLYVGASDGEPRTYLLGNWPAPFGIVLVLDRLAATMLLLAGLLAVGVVLAAIGEWDKRGRHFHALFQFQLLGVNGAFLTGDLFNLFVFFEVLLIASYGLMLHGGGARRLKAGFHYVAINLIGSTVFLLAVGTIYAVTGTLNMADLAVKVPQVATADQALLAVGGLLLLTVFAIKSAMVPLHWWLPPTYGSTSPPAAALFAIMTKVGAYSIIRVYTLIFGSGAGPLSDLATPWILPAGMLTLVIGTIGVLASRRLLDLACHSLIASMGTLLIAIGLASAAGLAAALYYAVQSTIASAALFLLAGLLAPGRGGRAKFGWYQQHAELFAGFYFLLAIATVGMPPLAGFIGKLLILEAGRAASHATTIWPAVLITSLLLIVGFARSGIQIFWNRIELPQVSAVRPVPMLPTFVIAGMIATVAALGFFAGPVMDDMTATAEQLLSPQRYIATVLQPRETSSLTGE

SEQ ID NO: 15147 - protein, 162 aa, BradyrhizobiumColbertium
MRALLPHPVLVVILALVWGLLINDLSWGAILFGLLLGVVIAWLTSPYWPGRSKIRNPLPIPEYFAIVLWDIFVSNVQVAYLVLFRRGASLKSQFVTVPLSLESPEAIATLAGTITMTPGTLSADLSADGRSLLVHCLDITDPAATVATIKSRYERRLMRIFA

SEQ ID NO: 15148 - protein, 89 aa, BradyrhizobiumColbertium
MIAASCAFAIIAIAASILLNVYRLIIGPDVTDRILALDTMVINAIGLIVVAGIVFGTAMYFEAALLFAMVGFVSTVAFCKFLLRGNVIE

SEQ ID NO: 15149 - protein, 146 aa, BradyrhizobiumColbertium
MMTMAAFIEMASAAFIVIGGAFLFVGSVGLAKLPDTMRRLHGPTKATTLGIGSLLIASMLYFLVRHQAVGIHEILITLFLFLTAPVSAQMIAKAHIFRSQELQRTLPLDAGGSGWATLAGQANSPKASAPSAHPVCASNPPRSQSD

SEQ ID NO: 15150 - protein, 42 aa, BradyrhizobiumColbertium
MVAQMSDQVRKVDPSYVVVGATIFVVLTIWCGWIAISFTGFS

SEQ ID NO: 15151 - protein, 53 aa, BradyrhizobiumColbertium
MFWHGILDEACSYLKQLGSLMILPAVTAASPCFEGGHSRSIPVEALRERGGRI

SEQ ID NO: 15152 - protein, 162 aa, BradyrhizobiumColbertium
MIVAEEGKIVSLLVEGLRTKEEPEFMSRIPFERVLRPLHEGAIVADFSDLRSREYGLFFDPDQGRDQSHEFSISKVIGDYARLQAGQGYGYVSDLVFDRTGKLAAVVISREASVGGGTYAFPYPGQLGRWSPKLSYYGLPYVTAEQASRAGLRLDMKEFQQS

SEQ ID NO: 15153 - protein, 113 aa, BradyrhizobiumColbertium
MGALAGAVPAILVAMAQSPVLAAWVALLFLSVQLLEGNVIAPWIQKRTIALPPALTMLSQTVLGILFGLIGLIVATPFIAVLLVAVRMIYVEWFLERKSGSDCGRKVAVCGAK

SEQ ID NO: 15154 - protein, 44 aa, BradyrhizobiumColbertium
MNRCRFNRTKVPQVFGPRATLDSIAAAATAKFGGSGNVEIARRQ

SEQ ID NO: 15155 - protein, 418 aa, BradyrhizobiumColbertium
MLSLMDIAAVLLTLSAVFGWLNHKFLPLSRSVGLLVMSVTTSLFLIGLDAAIPAVHLLKQLSEGLRQIDFAEIVVNGMLAFLLFAGALHVDLATLRSRAVPVFILAVFGTSISTATVGFLFWCICSLMGIPVSLPWALVFGALISPTDPVAVLSTLRNTNVPSELKIETEGEALFNDGVGLVLFTILLQFASSEEGAHVSVAEVAELLIREAGGGIVLGLLTGYLAYRAMRLIDDYAIEVLISLALVTGTYAIALHLHVSGPLSMVAAGLLIGDRGPRYAMSEQTQSYLFALWTLIDEILNSVLFLLIGLETLVLRFDLRSFGLAASTVPIVLFARFVSVAVQPFLFGWTRLLSMRNAPFLTWAGVRGGISVALALSVPDSPAKVAILTSTYAVVLFSIIVQGSTLGWVTRRTVKRAR

SEQ ID NO: 15156 - protein, 48 aa, BradyrhizobiumColbertium
MDGSLLLLVFVTALSAFGLAALEVAARRSSGGTIGGKPQATNAKRPVE

SEQ ID NO: 15157 - protein, 222 aa, BradyrhizobiumColbertium
MCPIRITLTDDHPLVLAGMKALLQAVDDIEIVGEATDGQTALDIIREVTPDIAIVDISLPGISGLEVARTVATQLPQVRLLALTVHEDHAYVQPMLQAGARGYLLKRSAADELERAVRAIASGGLYLDPAIAEKALPSSAGAHPSAETTGSELTPRESEVLRFIAQGFSNKEIAGQLNISIKTVETYKARALEKLGLFTRADIVRYGVAVGWLGQAGTGAAV

SEQ ID NO: 15158 - protein, 743 aa, BradyrhizobiumColbertium
MFHVKANSGPQLRLSVTWGRLGDLGSQGDRPRCQENPDDQNTKETVDVGVSSSHSAPAHREARSSTTRSAARRPLVLVFIAAAMPLALFAGWVVFLNAQQQRNHSQAAAVETLDSVVSRLASEISLQLEIAETIAASATLDKPDLDAFYREATRVNEARTLWETIQLVDPKGNQVLDVTRPLADGMRVIADRENFEQILKTRRPAIGGIGPPGPVTGKRVVAVRAPVERDGQLKFVLTIALVPDAMSQILKSAGAPTGWDGFVVDAKGNIVARTFGEQSELGQSASATVRQAIASAPEGSYVKTTSTGDQVDSIYKLIPGTSGWSVHFGIPTQELNGPVQRSAIFLAGGGVLSFVLALTLAWYTIRDISLRRREQEAQAALALSASEEQRRLTIDAADLGVFSWNFATREALVSPRAREMLQIGGSPDGDTSLPIDRMLNCIEPADRQQFESSLIRCRSGSVAIADFRTAPPHSRWLRASGRLSRLDQKNPDVVYGVILDIDETKRAELERQRLLRRLSEAEENERRRIARELHDQIGQTITGLLLGLKNLEQFLGPSHKRKVGLEKLNWLQGLARGIGRDIHQVASDLRPTALDDLGLYKALEAFCVEIQRRFGISVDLQPLGRRERLGQDVEIAVYRAVQEAVNNVVKHAKARNVSVVVDRRTAELRIVVEDDGNGFDLQDFSRSDARHSKLGLSVIEERLTILGGSLAIESEPGRGTSLFMRIPVPAEEMGYVPDPDHVN

SEQ ID NO: 15159 - protein, 130 aa, BradyrhizobiumColbertium
MQKQGEWRASKLVGVAVYNNNNEKIGDINDIILDPAGRVANVVIGVGGFLGMGERNVAVGFDQLKFVREPVKTASNDASGKAGNANPGSTTGSTTGSASTPSSRNDNWYPDHVVLNTNKDQLKQMPEFKY

SEQ ID NO: 15160 - protein, 123 aa, BradyrhizobiumColbertium
MSDEELPHDVKELVRRYIHSVAQLEALLFFHERPGERWDVESLSKRLYAGKVEMADALASLRRDGFLEGGPALYEFAPRAELRAVVEALRKAYSRHLIPITYIIHNKPRRIQAFSDAFRIRKD

SEQ ID NO: 15161 - protein, 85 aa, BradyrhizobiumColbertium
MAAVIYSLCAITSGFCAWLLVRAYSASRSRLLLWSAVCFAGLALENGALWIDKIVFPQDDLSALRVSIGLFAMTVLLLGMIWEAE

SEQ ID NO: 15162 - protein, 91 aa, BradyrhizobiumColbertium
MDHLAPVLEGATAFASLMASIYFLKFWRRTTDVFFLFFAAAFAIDAVARFVLAVVQATNASEPVYFIPRLITFSLIALSIAGKNAMPNKPK

SEQ ID NO: 15163 - protein, 739 aa, BradyrhizobiumColbertium
MPISYKQLLRYGMFGLAVAALVAFGISPFTGGIVQQWSRSDVETRSKLVFNAIQPLLSLDVEERAWDRLSDLFKRVALDQKILAVGFCDTDGSLIAPTPEMPADFSCEKLARSESDSFASITSGGRRVLVAAFPVASSRGRSYLVILTDLSFAAARSSQVLAYLLAALAGVVLVLTVGTIILAVIMMRGWMNALRRAVDEVRRGAQRAEPKPSGSSIDREIHKLLRDAEHIAVTSQIEWTPQSLQQVLHGALPGAEVIVVANREPYIHNASEGGTVVQRPASGLVSALEPIIRACGGTWIAHGSGSADRETVDEHDRIRVPEAAPAYTLRRIWISEEEQDGYYYGFANEGLWPLCHIVFVRPTFRLGDWRLYRQINQRFADAVVAEARTEDPVVLVQDYHFALVPKMIRERLPKATIITFWHIPWPNAETFSICPWKEEIIEGILGSTIVGFHTQFHCNNFIEGVDRFLESRIDREVQAVSLGGHETRIRAYPISIEWPPRELEKLPAAAQCRSDIIAQFGLAEGTRLIVGVERFDYTKGILDRMRAVDALLSRDPTWTDRLAFIQIAAPTRNKLSSYSRLQAEAEDLASEINERHKGRQRVVHLIVQHYEPSDVFRLFKGADVCVVSSLHDGMNLVAKEFVSSREDGAGVLVLSSFTGASRELSEALIVNPYDIEEMASAIELALSMPLEEQAERMNLMRQQVKEHNVYRWAGAMLLDASRSRTRERVLGMATRARSP

SEQ ID NO: 15164 - protein, 839 aa, BradyrhizobiumColbertium
MVLRNVILMTLAVALLAMGVALMVGGLWLIYLGGSWYYALSGLAFLATSILLFRRDERALWVFCVLTAGTLIWSLWEVGLDWWPLAARGSVIFIVGAILLTPWIAGSLAHGGSASSRLRGGSAWHGGGLALSIALCAAILVAVASWTTDPHRLAAKTTSVSKATPEPAAVEAQDLPPGEWHAYGRTGLGQRYSPLSQITPQNAAKLEVAWTYHTGDMRGRPGDPEETTFEVTPLKIGDRLYFCTPHQSVIALEATTGREIWRYEPKILDKLALQHLTCRGLSYYPGASSANQTPGTEAVDTAAGPQTDPPDAVINKPVPDMPIAVADGVPTKSCTAKLFMPTADGRLIALDPESGAVCRDFGRGTGQINLWANMPNVRPGAYYSTSPVVVAGGLVIVGGTVLDNVSTKEQSGVIRGFDVRTGDLVWNWDSGNPDQTAPLPPGQTYTANSPNSWSIMSVDEALGLVYVPLGNQPPDQWGGNRSQSVERFSSSVVALEVSTGKVRWAFQTVHHDLWDYDVPSQPSLIDLTIKGQTVPALVQPTKQGEIFVLDRRNGSPVLPVTETRAPGGAAKGDHTAPTQPVSALSFNPRPLNGASMWGATLFDQLACRIQFRRLRYDGRFTPPSTDGSLIHPGNFGVFNWGGIAVDPQRQIAFVTPASLAFVSQLVPRADDRTMYVQGNNRPDNSLPALNENFGAPFAVKLSAFTSPLGLPCQAPPWGYVGAADLATGNVLWQHKNGTVRDLMPLPIPFKMGVPNLGGPILTAGGLAFLSGTLDYYLRAYDVNTGEQIWEGRLPAGGQATPMTYLGADGRQFVLAVAGGHGSLGTKTGDAVIAYALPKE

SEQ ID NO: 15165 - protein, 294 aa, BradyrhizobiumColbertium
MSRPIIRSFFDEPTNTVSYLVGDPATRKAAIIDPVFDYDHSSGEVDTRSVEAMLKAAEDAGNTIEWVLETHAHADHLSGAPFIKARTGAKIGIGEHIKDVQRIFRPIFNATDLKTDGSDFDHLFRDGERFKIGELDVEVLYTPGHTPADISYKIEDAVFVGDTLFMPDYGTARADFPGGDAHKLYRSIKRLLALPSETRLFMCHDYKAPGRDTFAWETTVREQRENNVHVRDGVSEDEFVALRQARDTKLSAPRLLLPSIQVNIRAGKFPPAEANGVRYLTIPVKLKGGAQTCV

SEQ ID NO: 15166 - protein, 110 aa, BradyrhizobiumColbertium
MASSTFDPETFEKQAVEVAAILRALANERRLMILCRLVECGEDNVGSLAQAVGLSQSALSQHLAKMRDEGLVAFRRESQTLWYRIADPRIEQLFATFYRLFCAPVRTRSR

SEQ ID NO: 15167 - protein, 108 aa, BradyrhizobiumColbertium
MSLPTINPAQARNLLAKGAILIDIREANEHARERIVGARNLPLSKLDEADLAAHQGKQVIFHCKSGARTQINASRLASKLDGSCEAFIVEGGIDAWRKAGLPVENDRK

SEQ ID NO: 15168 - protein, 259 aa, BradyrhizobiumColbertium
MLSLTQGALGIASGSLVGFSLGLVGGGGSILAVPLLIYLVGVSDPHIAIGTSAVAVAANAAANLANHVRAGNVKWRCAAVFAVAGVAGAFLGSTLGKIIDGQKLLALFALIMLVVGALMLRGNSGEGEPSVRLSRENLPKLVAFGLATGALSGFFGIGGGFLIVPALIAATGMPILYAVGSSLLAVTAFGLTTAANYAVSGLVDWSLAGLFIVGGVLGGLLGARSATSLAGRKGALNTVFAALIFAVAIYMLVRSLGLM

SEQ ID NO: 15169 - protein, 369 aa, BradyrhizobiumColbertium
MILAIPGAHADIKVGIVVSATGPGSALGQPQMRTVAALPKEIGGEKIVYIALDDESDSTKGIQNARRLVIQDGVDAIIGSSLTPVTMPMLDVAREARTPIISLAAATAIVQPMDERRKWAFKVVPNDDLMALAILKHIAKSGVKTLGYIGVSDGYGEGYYKEVSRLAPTFGLTLTTHEVYARADTSVTGQALKVIATNPDAVFIASAGTPAVLPQQALRERGYSGKIYQTHGVATEEFIKLGGASVEGAVFTGEAFTIADDLPADDPFRKVRDQFVSAYEKANGQKPNIFAAHLWDSMALLKTAIPNALKTAKPGTAEFRTALRDELERVKDVYLNNGLSTMTATDHNGYDERSAFLIKVEGGRFRLMK

SEQ ID NO: 15170 - protein, 109 aa, BradyrhizobiumColbertium
MGSEWLTGNSIVRVVVSHHEFQKIEWHVFFQEFYSFDGLKEVPAPKSKVPLFSTKKYTERRVATTMRQFWLNKQGRWMIVAVPKPTSPAAQLVATTVTNECPGARFNIQ

SEQ ID NO: 15171 - protein, 278 aa, BradyrhizobiumColbertium
MAIRDILLTLTSYPDPTPVAVIDRAVSLASLLGAHIASVSCEVHVQVPGSFLAGAGNVGAIVASEAHKSRKNAQDLLATFESTAQKSGVAHELVLDRCLSSEVPGVLVEYARLRDLAIVPVPESYDQWYAESIIFGSGRPTVVLPEASASREFELNRVLVGWDFSRAAARAISDAIPIMEKAREVCILTVTNEKTISSRRSSSELAKNLSKHGIDVVVEEADAAGRAIGRVFAEQVASRRADLLVMGAYGHSRFREFVLGGATRSILTKPPIPVLLSH

SEQ ID NO: 15172 - protein, 219 aa, BradyrhizobiumColbertium
MGEIEVHALRDVDLDIFEGEFVVLLGPSGSGKSTLLNILGGLDSPTSGEAHWRDHNLVGATDAELTRYRREHVGFVFQFYNLIPSLTVLENVALVTEIADKPLEPREVLALVGLEKRTDHFPSQLSGGEQQRVAVARAIVKSPDVLLCDEPTGALDYETGKVVLAAIARANERLGTTTIIITHNAAIAGMADRVLRLGGGRIVGEERNAHRLSADEVHW

SEQ ID NO: 15173 - protein, 787 aa, BradyrhizobiumColbertium
MSLLDRKLLRDIGAMRGQVLTIALLVGAGVAVFIGSVSTYESLNMAVERFYGAARFPQIFVTLKRAPLSIVPQLESIAGVATVEPRIVREVIVDWPAASQPVSARIVSLNHAGDERLARLHLRRGTAPEPGSARTAAINEAFAEVNGVNPGDDVRVLLNGKVEAFHVSGIALSPEYVYAVKPGLPIPDDRLYAILWVDRSAAEAAFDMKAAFNDAVISLAPGTDPKPVIDELDRLLEQYGSVGAVQRRDQPSNRFLEDELNQQKVMSTTIPFIFFGVAAFLLNSALGRIVAVQREQIAALKALGFPTSTLTMHYLKLILVIVLIGSALGVGAGWSFGKAMIASYQSFFRLPDLPFRLTPWSLALGIAISLAAASLGVLTALRQVVRLAPAVAMRPAAPLGFRRSWIETLLPGNATRSRLLMILRNTAGRPFRSLLTVAGVAFAVPMMVLGIFWRDAINEMIDLQFNLVERGNTTVTFPHPMDRAIMRDLAREPGVLAVEGQRILPVRLRAGQQSYLTSVIGLSAGDELRRPHDATLRPIAVSPDGITLTRRLAERLDAKAGDILTVEAMEGRRRKRDLPVSAIVDEAIGMASYMEIETLNRFTGEGAVISAASLYVEPTAMIALGQRFKSLPTIESVTMKAYALTSFMEKIAGLVFVTAGILAAFATIITVGVVYNSARISLQERAWELASLRVLGFTRGEVASILFGEFAIEIALGILIGLPLSHAVIELIARFHSNESFQIPAVIAPQTYLIAVGVVLAAAAASARIVKGRVDRIDLVAALKTRE

SEQ ID NO: 15174 - protein, 399 aa, BradyrhizobiumColbertium
MHVTGRHIAIAAGLLAAAGVTAWLLVPASVPVETAAVTKGRFAATVDEDGKTRVRERYAVAAPLAGRLSRIRFKVGDQVQVDDAIATITPSPAPLMDPRTRREVEERLGVAEANLERARAVVERAKAQSDHANTDLTRARTLAQQGAATTQALERAELAVHLADRDLRAAEFQNHAAEHEISQMRALLARYGNDGNGHPDSWNVVSPVAGVVLKVAQESETIVQPGTLLLDVGDARDLEVVADVLSTDAVEIRPGADVDIDNWGGEGKLKGRVRRVEPAAFTKVSTLGVEEQRVNVLVDILSPAKQWARLGDGYRVDVQITVLARDEATIVPSGALFRRGEGWNVYVAKGGRAELRQIELLRRSGRFAAVASGLAPGEEVIVYPSDRVAPDVRIAPRSP

SEQ ID NO: 15175 - protein, 379 aa, BradyrhizobiumColbertium
MLKISTDLHPPGREKPMTETIRIKRFQARPVIVPMNLPLQTATGAVAKAPLVLIDCETDQGAVGHAYLFSLTPSALRPLAAMVTEMSDLLTGDELLPFEIERKLAQRFTLLGLAGLQRLAQSGIDMAAWDALARTRSLPLARLLGGAPKPVRAYNSKGLGIMPAGAAVEEAHKLLAEGFQAAKIRVGRPDAREDLAVVRAVRKAVGDQVTLMCDYNQALTVTEAIRRGEMLDDEGLTWIEEPIRHDDYAGCARIADALHTPVQIGENFDSAFSMQSALSAEACDYVMPDVQRIGGVTGWLRAAALAHAAGIEMSTHLFSEVSAHLLCVTPTAHWLEYVDWADAVLATRLKIKDGFALPSEEPGNGIAWDEAAVKKYLVG

SEQ ID NO: 15176 - protein, 520 aa, BradyrhizobiumColbertium
MKQEISEEQRKSGILTGAVIVFLLLALPLAVWLDLTELSSTALRRQAVDLNSVITSVRSYYASNVVGRVLANPNGTTKVVHNYESVPGAIPIPATLSLELGRVIGAQQENITYRFVSDFPFQNRAPHQLDKFEKDALEALRKDPEQKIVDTETSLFNDKVRLVAPVTMGPACVSCHNSHPESPKKDWKVGDVRGIQEVIIAQPIAANIFSFKFLLAYFVIAAGSGLAFLSLQRRQALRIKGMNKELESANDFLASLSMKISRYIPPQVYKSIFSGQKDVTIHTERKKLTIFFSDIQNFTATAERLQPEQLTQLLNEYFTEMSAIAHEYGGTIDKFIGDAMLIFFGDPETRGDRADAQACLQMAWRMQQRLAELNAKWRASGIEQPFRSRMGINSGYCNVGNFGSADRMDYTIIGAEANLAARLQSIAEPGGIVLSYETFALVSDVVRAHALPAITMKGISREVIPYSVDALNDAAAANSGIITERAPGLELYLDPAVVRSGDAARVRSLLENALATLKPA

SEQ ID NO: 15177 - protein, 317 aa, BradyrhizobiumColbertium
MPHRARITMKNYLAFFLLLTMTTASAHGPLPHRLAAPSDLVRAGLTDSDTTAGGTARLCEQVTFSRGLRYGESEANVLDVATNATKADTPRPVLLFVAGDTFTGDRAAPELARQIQDQVMCFAARNGMVGVRVNYRLAPAATWPAGASDVASALSWVHGNIDLFNGDHREIVAVGYGAGAFHLATLLAHPELQTDGADVAGVVLVSGIYRVGKDASDSEKAYLGTDAAQYDKRSVFPGILNVDVPIVLAWAADDSAGLVAQGETLKKTLCGAGHCPRSALLRSRDGIASAFGLDGSGDSLAEPTLLLVRQLEARGLP

SEQ ID NO: 15178 - protein, 186 aa, BradyrhizobiumColbertium
MALFGGGEDGPAGLRYTDDFINAAIEQDLIDRIAALPLRRFQFGAFEGNRRVASFGYRYDYALQRLAEAEPIPDWVTPVARRVEAWAGLPEASVRQVLCTEYEVSVGIGWHRDKPHFDKVFGLSLGSPCKFRFRRRSGDRWERHTLEALPRSLYMMDGEARSVWEHSIPPVEARRYSITFRTMKRT

SEQ ID NO: 15179 - protein, 46 aa, BradyrhizobiumColbertium
MAEKHSADPAEIMRATGHPELEYAAGWTIAGLVTIATIVAAWVFAI

SEQ ID NO: 15180 - protein, 528 aa, BradyrhizobiumColbertium
MSAAPDKWRPSLGLVIFTVLATVAILPLVGLFFFRLYDNQLIRQTQAELIAQSRVLATIYAQEVAARLDSGLTLGTEVPPGVLPDPGDQVTPIRPALDLTANDLLRRRPGAQAAIRPAQPAFVEIGARLTPIIRETQKVTLAGFRILDPQGVVIAGRQEIGQSLAHIEEVADALHGQYRATLRNRVPDKPPPPIYSFSRGLGVHVFSAMPVIVNNRVAGVIYTTRTPSNIFDHLYQERAKFVLAGLAVILGTIAIGIVFSRTITLPMRELIDRAARIGRGDREAFQPLRHYGTREFAQLSHSFLGMAEQLARRSDYIATFSAHLTHELKSPLTSIKGAAELLQDSVQGKSGGLTPAEQKMFIANILSDTQRLEAMAQRLRELARAESLPQNERTELAPVIADLRSRFPAGDISASGDLDRPVAMSSEKALIVLSHLADNAMRHEARSIRLEAAFERTTLLLTVSNDGEPISPPNRDRIFDAFFTTRRDQGGTGMGLAIARAVMASHGGSIRLKPTDKGAAFELQFPAA

SEQ ID NO: 15181 - protein, 234 aa, BradyrhizobiumColbertium
MAHRILIVDDEIHIREVIRVALKKAGMDVIEARDGKEALARFAADRPDVIVLDIGLPEFDGLDVCREIRKTSDVPILFLSARDEEIDRILGLEIGGDDYVTKPFSPRELVARINVILRRLSPRNGEAKSGPAALVQGGLLIDPEQHVASFAGTPLKLTAIEFGILRAFLTRPTSVFNREQLMRAAYQLNIQVSDRTIDSHIRNIRAKLAALACENVIETIHGVGFKLGRCEKEA

SEQ ID NO: 15182 - protein, 502 aa, BradyrhizobiumColbertium
MTSLPSTSTTDIQPIGPSALPVQLTMALLLAALADWLFYGQRLGFSLAIFVIAIACASMFTNHAMLNLRRAAIGGAILALGLVPAMEEINALSFPILAAALLVALLLTTNPDTAGLVDRARALRDFILLGFFRFLPDVLKVFDKAAFAKGIALWLMPMALSTVFVTLFAAANPVIEQWVSLLNPKVVLEHVSVPRVLFWALMLTLVWPFINVRWRSRKIAVDAAANVAEPEPVAPLVSPDFLGPSTILRSLILFNLLFAAQTVLDGIYLWGHVALPDNLTYAGYAHRGAYPLIATALLAAAFVLVAMRPGGLAEKSRVIRPLVYLWVGQNVLLVASSILRLDLYVDIYMLTYWRIAAFIWMGLVALGLILIVARIVLDRSNLWLVGANLIALSIVLYGCSLVNFDALIADYNVAHSREASGKGVQLDIDYLLTLGPQALPAIDNAMALRPGAGQGSLVSRRDRLVEQQRRDLAWRSWGFRSWRLQRRLDAQARAQSGSGPAG

SEQ ID NO: 15183 - protein, 447 aa, BradyrhizobiumColbertium
MQLLRRIGLILLRLAAPVAAFAAANKNDPYLVLLRGAGNIALVFASIAIVIVLWRRGRWRSIAGKLLVMLWCLPPLLMSAAHVRFELRKHAVLASSDPEARQLGPHFMVGYSSFPEVARLAEKGLIGGVYITRHNIRARTVGALRAEIATLQDIRRTAGLPPLFVAADQEGGIVGHLSPPLTKVPALATLAGLAPDEQQAKAEEFGRIHGRELADLGVNLNLAPVLDLKPPPRRNRLDFHTLIGQRAIATDPVVVGTIATAYVRGLEESGVGATLKHFPGIGRVDGDTHHFSANLDTPVTELEATDWRPFREVLSRSRSALMVGHVTLTAVDPDRAASHSKRVVQGIIRDKWNYHGVVMTDDLVMGAIYQNDVCKAVVEAINGGVDLLLVAYDGVQFYRVFACALEGSRQDKLDAAMLRASAGRLDSGRPVVQARTVSRAISADRQE

SEQ ID NO: 15184 - protein, 423 aa, BradyrhizobiumColbertium
MYHHVKKLMFTVRVDEPDPRFGNMLLEQFGGANGELAAAMQYSIQGLNCEDPDRKDLLMDIGTEELSHLEVVGCLARMHLAPSKNDRQAAEADPLIAIAGGGGVNLFNSQGNPWTADYLKITGELDVDLRSNIAAEARAKIVYERLINFCDDAGSKDALQFLMTREITHMKAFARALESLSKPAFSVGRIAPTPGLVNQYFNDSTGSGDHGEIDTRGPWNEGEDWVFTESPALQSSDPGAATPIVTESSPPVDEAGLTDLLLHELRDILHAEKQLTKALPKMAQAARFDQLRELFEQHLVETENQVERINECFELLGENARAKPCKGMMGLIEEGQEVMKEGEDKEDAAADLALISAAQRVEHYEMSGYTTARNLAQQLRHSAIVALLSRSLAEEENADLLLNQVARSLMSVAKMPAALEQAE

SEQ ID NO: 15185 - protein, 68 aa, BradyrhizobiumColbertium
MSKQSLREEAERLIRESMEKKTIVVKQGTTRIEAICGKCGAPNRVQAEKGQSRVKFACKNCGHKQETL

SEQ ID NO: 15186 - protein, 281 aa, BradyrhizobiumColbertium
MPHPAIVRDNVAVITGGASGIGFAAATAFARAGMKVCIADVDETRLAEAATKLSSITVATNVMSSVVDVSEAESVLELERTVRGRFGGTDVLMNNAGIQPGSTLFGDPDNWQRIIGVNMWGIINGSRIFAPNMIARGRCGLIINTGSKQGITTPPGDPAYNVSKAGVKAFTEALQHELRNTKDCQVSAHLLIPGFVFTGLTAKGRSEKPAGAWTPEQTVDFMLMRLEAGDFYILCPDNDVPRALDEKRMLWAAGDIVENRPPLSRWHPDYADAFKTFVEGK

SEQ ID NO: 15187 - protein, 498 aa, BradyrhizobiumColbertium
MAVSQAIPITRHPFANGSYKQMLIDGKWVDAASGKRFETRNPATGELLATVAEGDKEDIDRAVAAARRAFEGSWSKVKPFERQNLLLKLADLVERNFDELSQLDTLDMGAPLSRTRAYRLRAVGMLRYYAGQTTAIHGETIENSLPGEIFSYTLKEPVGVVGAIIPWNGPLTATIWKIGPAIATGCTVVLKPAEEAPLTSLRIAELAMEAGVPPGVINVVPGYGETAGAALASHHDVDKVAFTGSHVTGQSIIRASAGNLKRVSLELGGKSPDIVFADADLDAAVPGAAMAVFANSGQICSAGTRLFVEQSIYDEFVGRVAEFGKKLQVGNGLDPNVQIGPLVSEQQLERVTGYLDIGQKEGARALAGGGRVTEGALSKGFFVSPTVFAGVEDNMRIAQEEIFGPVISAIAFKDMDELVKRANNTTFGLGSGLWTRDVSKAHAVAKSLRAGSVWVNCYQAMDPAVPFGGYKMSGYGRESGKQHVEEYLNVKAVWIKTA

SEQ ID NO: 15188 - protein, 167 aa, BradyrhizobiumColbertium
MAKAAAAAGIATGQCLCGKVTFEIHVPARWAWHDHSAASRRAHGAAYATYVGSWKKRFRITAGKTALTRYEDKATKTARSFCSHCGTPIAYERPRGPHMVNIPRALFNERTGRQPLYHIAIEELQEWAYTGEPLVPLKGFPGVVWQRSKKRMRARGGDPFELGPGEM

SEQ ID NO: 15189 - protein, 553 aa, BradyrhizobiumColbertium
MKNKITGRSAFLALLEDEGIAHLFGNPGTTELPIMHALKDHPDLTYVMAMQESLVVAIADGYSRASGKLVACNVHVAPGLGNAMGSLYNAQFTGTPMILTAGQQEQGHGLMEPVLYGPLVRMAEPLVKWAVEVTRLEDLPRIVRRAAKVATTPPTGPVFISLPGDILNSEAGIDLGRSTRIDARTKPSDEALKAFAARLLKAERPVIVTMDEVVKSDALKEAAALAELLGAAAYQSSTPYGAHFLSESPSFVGTLARVQKVARDTLAPYDLLIALGGDPLRMSVYSEVDALPDGLGIVQIGLLDWEIAKNYGAEIALKADLKETLRALIPVLKEMGGATLASKAKQRLAELAPTNWAARRAALVQEISKSADRTPIDPDFLVLQMVEAMPDNAILVDEGLTSSRQITALRPHRDRYGYHGLASGGIGWGLPASVGASIANPDRPVVCFSGDGSAMYSIQSLWTAAHHKLPLNVVIVNNGGYRIIKQRLLAFHGDDNYVGMDFVDPPVDFVGVAKALGCEAIKVSDPRELKATLASAFGRPGTKLIEVMVDGKV

SEQ ID NO: 15190 - protein, 459 aa, BradyrhizobiumColbertium
MAKEIRLNAFAMNCVAHQSPGLWTHPRDRTADYNRLPYWIDLARTLERGRFDGLFLADVLGVYDVYDNSPDAALRNAAQTPSNEPLLLLSAMAAVTQNLGFGVTSNLSFEPPYPFARRMSTLDHLTEGRVGWNVVTGYLDSAARGAGKDKQTGHDDRYDIADEYMEVVYKLWEGSWEDDAVLRDRTRGIFTDPAKVHRVNHEGANFRINNTIHLSEPSPQRTPVLYQAGTSPRGRQFAARHAECVFMSGPSAKVIAPRVSAIRQEAAARGRNPAEILMFSMMTIILGRTEAEAKEKYADYRRYISPEGALALMSGWTGVDFSGYDLDQQVRHVQNDAGRSAMDNVTRADPDRVWTVRDVIEHVGIGGAGPVVVGKPEMVADKIEEWFEATDVDGLNVAFAVSPGDFEDIADMLVPELTRRGRYKPEYAKGTLREKLFGAGRARLDANHPAAEYRVGKKG

SEQ ID NO: 15191 - protein, 469 aa, BradyrhizobiumColbertium
MTRADAIARARDDFKSGAFLAELDRRVAYRTESQNPSRGAELRAYLNQEMQPAFAALGFSSRIVESPSGKAPFLLAEHHESASAPTVLIYGHGDVVDGMEGEWREGRDPWRTTVSGARLYGRGTADNKGQHSINMAALRAVREARGGQLGFNAKFIIEMGEEIGSPDLGKVCDLHRDALKADLFMASDGPRLSADRPTLFLGCRGGIRIHLDVNLRDGGHHSGNWGGVLANPATILANAISTLVDGQGRLLLDALKPPRLTNQIRSYLADVQVVPSADEPALAENWGEEGLSAAERLYAWNTLEVLAMSSGNIEKPANAIPGQANAVLQLRFVVGTKIEGLIEAIQAHLTAKGFPMVEVRAAQSFAASRTDFDSPWIKWAAESVQATTGKAPAVLPNFGGSLPNDVFSEILGLPTIWVPHSYPGCSQHAPNEHILLPLTEEALTVMAGLFWDLGELPKPLAGPQTGPLT

SEQ ID NO: 15192 - protein, 303 aa, BradyrhizobiumColbertium
MKHFRSIGLALAATFVVSQAGAQQLTGTLKNIKDTGAITLGFRDSSIPFSYLDDNQKPVGFAMDICYKIVDAVKKELKLDKLEVKLNPVTSATRIPLMANGTIDLECGSTTNNAERQKQVAFTNTHFLTASRYVFKKSSGLKSIDDLKGKTVVSTAGTTNIKQLTEANAAKGLGANIIPAKDHAEAFLMVETDRAVAFVMDDILLASLVAGSKSPGDYEISKDAFSKPEPYGIMLRKDDPAFKKVVDAATAALYTSGEAQKIYDKWFMQKIPPKGLNLNTPISAQLKNEFAKPTDSPNPDDYK

SEQ ID NO: 15193 - protein, 251 aa, BradyrhizobiumColbertium
MARSRGGHVNYNWNWGIFFQPNPMGTGTYLDMLLSGLALTLKTAALAWVIALITGSIVGVMRTLPSKGANWFGFAYVEFFRNMPLLVQLFLWFFVLPELLPKGAGTWLKQLPNAPFWTAAIGVGFFMSARVAVQLQAGIGSLPRGQKMAATALGLTTVQTYRYVLLPMAFRIILPPLTSEFLNTIKNTAVAITIGLLELTGQARSMQEFSFQVFEAFTAATLLYLLVNAVVVTAMRFLERWVAIPGYITGK

SEQ ID NO: 15194 - protein, 230 aa, BradyrhizobiumColbertium
MFANLDFDVIRRALPYLFYEGMTFTLTLTGLAALGGLIFGTALALMRLSGFKILGRIAGIYVDFMRSLPLVLVIFWFYFLVPYIGQWVTGASRPISVGAFASSLITFIMFEAAYFSEIMRAGIQSISRGQPAAASALGLTYAQSMRYVVLPQAFRNMLPVLITQTIVLFQDTSLVYVLSITDFLGAASKVAQRDGRLVEMYLFAAIVYFTISCVASYGVRRLQARIAIIR

SEQ ID NO: 15195 - protein, 243 aa, BradyrhizobiumColbertium
MIEISHVNKWYTPSFQVLTDCTTSVTKGEVVVVCGPSGSGKSTLIKCVNALEPFQSGDILVDGTKVNDPKTNLPKLRSRVGMVFQHFELFPHLKIIDNLCLAQEKVLGRPRDKAQTKGMQLLERVGLKEQAQKFPAQLSGGQQQRVAIARALAMDPIVMLFDEPTSALDPEMVSEVLDVMVDLAREGMTMMVVTHEMGFARKVANRVIFMDRGEIVEDASKDDFFGKPRSDRAQKFLSKILSH

SEQ ID NO: 15196 - protein, 286 aa, BradyrhizobiumColbertium
MDPIAYVNGSFVPLSEAKISVLDRGFLFADGIYEVSAVLDGKLVDNASHLARLERSVGEIKLKLPETIERITELQKELIARNKLDNGLVYLQVTRGADKGRDFPFPKGDVKSSLVMFTSEKDIVNAASAKTGINVITVPDIRWERRDIKSVALLAQVLAKQAAAEAGAGEAWMLEDGYVTEGGSSSAFILTKDDVIVTRRNSNAILPGCTRKAVIALAEERQLRVEERSFTVAEALAAKEAFITSASSFVQPVVAIDGKTIGDGKPGPVATRLREIYVEFAKATAV

SEQ ID NO: 15197 - protein, 161 aa, BradyrhizobiumColbertium
MKPRMNYYQAAPDTIKALMALEAQIQSTGLEKSLIELVKIRASQINGCAFCINMHTEDARKRGETEQRIYLLDAWRESSLYTERERAALAWTEAVTLISETHAPDDAYEQARAQFSAEEAVNLTMLIATINAWNRIAIAFRAVHPVKVKASMAQATTSTQI

SEQ ID NO: 15198 - protein, 536 aa, BradyrhizobiumColbertium
MSTLQPTFDAAAGRPARSEPTAPSVSAKTWIAVIGATLGAFMAVLNIQIVNASLADIQGAIGAGIDDGGWISTSYLVAEIVVIPLSGWLAQVFSIRIYLLTNAILFLALSAACALAQDLSQMIVLRAIQGFTGGVLIPLAFTLIITLLPRGKQPVGLALFALSATFAPAIGPTIGGYLTENFGWQYIFYVNLVPGAIMVGMLWYALEAKPMKLSLLRGGDWAGIVTMAIGLSALQTVLEEGNKDDWFGSPFIVKLSVIAAIALVSFLVIELTVKKPLLNLRLLVRRNFGFGMLANFLLGIALYGSVFILPQYLARIQGYNAEQIGMVLAWTGLPQLLLIPLVPRLMQRFDARIIIGIGFVLFAASNFMNIHMTNDYAADQLLWPNVVRALGQALVMAPLSAVATAGIEPENAGSASGLFNMMRNLGGAVGIALLQTALTKREQYHSNVLMQSVSAFDQASRTRLEQLTQYFVNHGILDHADAVHRAYVAIGRIVQKQAYILAFSDTFYLLGMALIVALLAVLFLKKPGQTSAGGAH

SEQ ID NO: 15199 - protein, 382 aa, BradyrhizobiumColbertium
MSIAYVAETNKKISLRPSRQAIQRVALGLALTLGIAAAGRFGYDYITTGRYLESTDDAYVKADSTIVAPKVSGYIAKVLVGDNEKVKAGQVLAKIDDRDFKAALDQARADVAAAEASVRNIDAQLKLQQPIIEQGTADIAAAEANLKFAQEERARYDDLMKTGSGTVQRAQQTDAALRASSAQLQHAKFGLLAAQRKIDVLTTQRAQAAAQLERARAVAEQAALNLSYTTITAPVEGTVGARSLRVGQYVQAGTQLMAVVPLDAVYVVANFKETQLTHMRPGQPVELHVDSFRNTTLRGHVDSLSPASGLEFALLPPDNATGNFTKIVQRVPVKIVLDDHSLTGLLRPGMSAVPVVDTKQTVLAERGTAKQIAGKTARSSGG

SEQ ID NO: 15200 - protein, 303 aa, BradyrhizobiumColbertium
MDRFTSLTAFVRVVDAGGFSAAARRLNMSTTMVSNHVQALEDRLGVRLLNRTTRKVSLTEIGKAYYERSTQILADLEQADDIASELQSVPRGTLRVHVATHMVPLVAPVVARLLSTCPELKIDLRMGEAEVDLIEEGYDVALRMTQPRDSSLVVRSLATWRHVLCCSHDYIDKHGRVQKLDELTGHNCGRHLNYPFGDEWRFLDRKGTPASVRISGSFVTNSGEALREVALDGAAVCLMAGFLIQDDLEAGRLVRLLPEYRTVELSMNAVYPHRHHLSAKVRTFIDLLVHHSAEQQKLINPYS

SEQ ID NO: 15201 - protein, 484 aa, BradyrhizobiumColbertium
MALPRSGNCIMDFDQLTLTEAADGLRAGKVTSTALTREALARAKANAGLNVFVTLDETGALEAATAFDAAGDRSKPLGGVPVVIKDNIEVAGLPCSAGTPALKDYIPAMDAPVVAKLRAAGAIIIGKTSMHELAFGISGYNTAFKTGAEFGVRNAYDRARIAGGSSSGTGAAIGARIVAGGLGTDTGGSVRVPAALNGCASLRPTIGRYPQNGIAPISHTRDTAGPMAATMADVALLDRIIAGGDEIAPADLKQVRIGIVTSMLANLDSDTAAAFDTAIGKMKARHITILEIEMPRLAELNGQVGFPVALYEAYDDMVAYLKHTGTDLSVEALAKEISSPDVKGTYDGLVIPRKLPGPNDTLIDARPIYDAAIKIARPALQALYSETFSGNRLDAIAFPTTPRVAIASNPDSSSLENFGLFIQNTDPGSNAGIPGIQIPIALGDTSQLPIGLELDGPAGSDRHLLAIGIALETLFGRLPPPRRS

SEQ ID NO: 15202 - protein, 1149 aa, BradyrhizobiumColbertium
MDAISSLDTYELSDRYDREEGRVFLTGTQAIVRIALDQALRDRAARLNTAGFISGYRGSPLGGIDQELWRIQERLKRDRIEFLPAVNEDLAATAVLGSQQVETQADREVDGVFGLWYGKGPGVDRSGDALKHGNAYGSSPQGGVLVVAGDDHGCVSSSMPHQSDVAFMSWLMPTLHPASVGEYLAFGEYGYALSRFSGMWVGFKAISEIVESGASVALRPPRAFLVPDFTPPPGGLHYRWPDLPGPQIEERLEAKKHAVYAFAKANPIDRHIYDIPGATYGIVTTGKAHLDLMEALRLMGLDEAACRNIGIDIYKVGMVWPLALHDAMDFVKGKREILVVEEKRGIIESQFKEYFYDYPGSKPERMVGKHDEQGARLISWIGELSPRALASVLARRLDPMFPGLNLAARAAALMPEAARTINVGGATRTPYFCSGCPHNTSTKVPEGSKALAGIGCHFMASWMDRETSSLIQMGGEGVNWAASSRFTGRKHVFQNLGEGTYYHSGSMAIRQAIAAGANITYKILFNDAVAMTGGQPVDGPVSVQAIAHSVRAEGVERIALVSDDPAHFSPAELPAGVTIHPREEMNVVQRELREVSGVSVLIYQQTCATEKRRRRKRGQMADPRRFAYINDLVCEGCGDCSVESNCLSVEPKETPFGRKRQINLSACNKDFSCLNGFCPSFVTVEGATRRKKSASQIDAIGRAAALTLPATATLDRPYDLLVTGVGGTGVITVGALIGIAAHLERRGVSVLDFTGFAQKFGPVLSYIRLTASPEALHQVRIDQGAADALIGCDLVVSSSPKASGTYRRGTRAAVNTAEMPTGDVVRFRDADLASHARLRAIGRVIGEGNLDTINANALAERLLGDSVYANIIMLGFAWQRGLVPVSLQALLRAIELNGVTVERNKQAFAWGRIAAADPGLLPSTDDAPKAETLDHLIARRAEFLTAYQNAAYATRYRAFVARVRNAEANVNSEALTETVARALFKLMAYKDEYEVARLHMQSGFMDELKNEFEDGFRIQYHLAPPFLPSRRDARGRPRKRAFGQWIQMPLAMLARLKALRGTLFDPFGYTPERRAERELIGWYEALIERMLGRLDTAPLTDLVAIAAAPMEIRGYGPVKDAAIGKVKSEIERLLAELPAPLPARMRANG

SEQ ID NO: 15203 - protein, 151 aa, BradyrhizobiumColbertium
MIEEQDTRILAHLQKDGRATNQQLADEVGMSTSACWRRVRALEDSGVIQGYAALVAREQAGFAMSAILHVSLERHDAKFVDEFVARVTKRREVLECFATTGDADYHLRVVVQDMAAYNRFLDEFMFRIPGIRYVRSNVVLKEIKTSVELPF

SEQ ID NO: 15204 - protein, 516 aa, BradyrhizobiumColbertium
MHIDLIETFDDFERIEDNWNAVYDADPDAQLFLSWKWLAGWLRQIAGPWLILAARESDDDGAPYVAFWPLRTYFKSTDGKFRNELNMAGNFSADYTGILCASRFESQAIPAFARQLKRMNWARVNLDNIRLSGTRYRLLMAHFPKAKFQHDEVNRINKVDGIDNNVCPFASLPADWDAYLAGLSANTRQKIRRLLKLVDAPGEFRITEATAETIDRDLNTLLQLWETKWRPRKGGLVDKLVRSNRAMLTTSFRSGLLFLPTLWQNDRPLAALATLIDRRKRSFLFYMTGRDESHDGPPAGVILHAYSIRRAIADGFAEYDFLRGNEPYKYSFGVKERRIRSVTISTRNGLNLGGRLDRRTLGDALEEATRLHQAVKLADAERGYRQILDVEPGNPDAIHRLGQLYATRGNHVAARRLFKLLTAIKPETHKSWFCLAQSCEALNEHMEAARNYREVIRLKPDAPDAFSALGRVLVKLGLVRDFDEALAVVLGEAEQQCDRPERATRMLPTRDTRDAR

SEQ ID NO: 15205 - protein, 452 aa, BradyrhizobiumColbertium
MSKDLVLRQQPPEAAWYANLPRSTRLPTIAGIIVMTVMLCGFGVWGNVAPIAGAVVASGVFVATGQNKIIQHLEGGVIRTIHVREGDLVEQKQLLVELDDTVPRAELRRLYLRSLRLSAIDARLQAEMREDAEIQFPDSVLSATSDPEISQIIESQKLTFIARRNNLNSDIAGIEEGINALSERIQGSNVQLDGVRRQIALLDDEIETKRYLLQTGLVRKPELLVLQRTKANLEGEIGRILGEIGDAKERIARSKEQINGVRKTAIKVAVEQMHEVRGELADVRERMLAAQGVLDRIRITAPVKGVVVKLRYHTQGGVVEPSKTIMEILPLQEELIIEARVRPQDIDTMKNGQHAMVRLTALNQRITPMISGDVIYLSADTLADERKSQQVGPTDIYIVRVKLNRNEAMAIPDFSPTPGMQVEVYIKTHERTFFQYIAKPIHDSMMRAFRER

SEQ ID NO: 15206 - protein, 718 aa, BradyrhizobiumColbertium
MGWGSEEKRDLARDIEDSTSADGDTARVLTFPGRPHGRESRSDASIVSPLPGERPQPPSPDAMPPTPTSGTVSAATPTPASAARLEQPAVQQPRGTPARSDARGTTDKASIGNGSASPAPPGGGGGGAASGGGRGNGGGSQPLHKRSGDNEFRDVLGKGLSGARRNLVTVGIFSVMVNLLVLAIPVYLFNMSDRVLTSRSTDTLVMLTMIVVAAIAAHVLMDVLRRIILMRVAVDTEARLGGPVLSAAAKAAQTGSSREFQTLADLQHLRSFITGPVLLTMFDAPVTPIYFAVVFLVHPHLGLIVLSSGVLLMGVALLNQRITAMPFTRANAYGTRANLQAEAMARNAQVINAMGMIPEGVLVWGRETVESLKEQVIAQDLNILMTGISKFLRLCTQIAILGWGAWLALEGQLTGGMIIAGSIVASRALAPLEGTIEGWRNFVQARSAYSRVKALLQSSPLNLDRLRLPRPQGHLSVERILYVPPPTKKVILNGISFQLEPGESLAIVGDSGAGKTMLARMLVGSIIPTAGNVRLDMMDLRNWDPRQFGESCGYLPQDVQLFPASIKANIARMREDAIDADIFDAAELADVHEMISSFAQGYETIVGMDGSPLSGGQRQRIGLARAFYGNPRLMVLDEPNSNLDASGERALAKALLRAKDRGITVVTVTQRAALLRSVDKIMILSSGAVQAFGTRDEIIPLITGRKPNGGDGPPLLNS

SEQ ID NO: 15207 - protein, 645 aa, BradyrhizobiumColbertium
MVPGGITELVWHFIAHLRITDDIARDRTAYEGPALPKPLDDYKTPRPDFDRDHDLDAFDTTPIGPPVIRLLDDHILSKLPQVRSQGIPIDDDLDLPTRLPATPIFRPGAGGGGGGSDHEIKVIHEPGGEQGQIQIRQLNGMLDNDISLQGSFGSGDTGVLSAQAAQISAQAASLLQHMADDANGQIPSQWWIPQNGAGVTAFVQDFDNGQVAHDGTVNANSVVPGYYLNGELQTPAPEPPSPELGRPADPDTGNGLGLWAEAGGNVSFNGAMIVDLSESGRSMIVKGDYFHTNAIFQTNSLMDEDQIAASQAEDGSMTAGDDITDNIADFIQHPGVYSLMPATYAGPNWHVDVVNGDYYNVQTLVQMNYLLDNDVIVQTGGSNHYDLISGENEQGNLAQIFNGSFHYDLIIVAGAYHGMNVIFQNNILLDNDAVTQLAKGDEQTQSLAAGQNELLNAATIETFGNDNFLPLTPGLESLVAALANGIPGLDPETGTLLPGTGGTFEVLYITGDYYDINAVWQTNVVSDVDVLLQLLERPSDAAQQLHPGDDGAQVASTGANMLTNDAAIVDVGPTDAYVGGQVYGDTILVQANLLPTDADPALARDTQTLVSELVAFVTDAQDEEQQAPPAPPPPPCDDAISNVMH

SEQ ID NO: 15208 - protein, 260 aa, BradyrhizobiumColbertium
MSYPKKKYDPDQDQDQEQDQKQANLQGQLQGQLQGQGQGQAQGQAQLAVQSLDSKSENENENDNDNSNENKNENENSIDNKVDNKLANSVDNDVDNEIENKVENTVDTKVNVEVDVDIDLDLKADGLSSPVIDLSCLSDVKGSVIMPDVVDQKLDGNGNQFNIDQVNNLIDNDWNRSSVDYDGKGGEFRMDAKAEGGDVKMHSDIEDVIGDSASGVTASADAAISQEAFNQTITQGANIQFNSITMSVAGNDLQDSHDLG

SEQ ID NO: 15209 - protein, 189 aa, BradyrhizobiumColbertium
MPSGRLPSKPDFDAIAAAAPASADRRTLILALIGNLVSSWSNNESLFIYVLMILLRTDQASAALTFATLNTTRARLDLIQRLAKITIKDKQLNVALTKVIERFNETTQIRNEFNHCMYIVDSTGQITSTQSMRISQSKNGLQFGERKPMDDARLKSMVNATKDMTRINREIWDLLPRLESHIRSTDAAR

SEQ ID NO: 15210 - protein, 173 aa, BradyrhizobiumColbertium
MWHWVRDTVRVRRARKAAADMLVPIVEQSRARLGGISEAVWSDPYITGLVVMLISVVARVEGGEFSERALFRIQHGAWHDITSVRDSGIAERFMLLNKGRDRDFELGCHNAAAFALVLFSTKEMLEGAGVPLVDTLLDSPVAQREDVREAWSQCFDAYICARANDPVGCRDQL

SEQ ID NO: 15211 - protein, 246 aa, BradyrhizobiumColbertium
MRGGDPFSDESPEAVERGAPNGFDFEQPEATIASKLKPTIVVIHPRAVFRDCFARCLEVSYQDHHVYSFASVEDWRGSTEPLASAPAVVIIVVESGDASSLNDLQSLDSATGKTSFVVVSDVDDVDHIVRTLKRGARGYIPSNLPFNVAVEAVRLVEAGGIFVPASSFVDREPPPAPVKPQVTLTERQTAVLEAIRHGKANKQIAYELNMSEHTVKVHLRHIMRKLKVRNRTEAAILPKSLISSKD

SEQ ID NO: 15212 - protein, 261 aa, BradyrhizobiumColbertium
MRWLKFTASGRTSWGIIEGEQVVAVDGDPFGEWRRTSRILPLSQVKIELPLIPRTFYCVGLNYLRHLKEAADKRGEVPAVPDRPEIGYRAQNALIAHGEDVVIPSFATDKIHYEGELVVVIGKKVKHLTEANAMDCVFGYTIGNDVSERNWQKADRGLWRSKNADTFKPMGPWIETDADLDKMETIVRVNGRETNRFHTNDMIFGVVPFLVELTKYFTLWPGDVIWMGTDGASPDIKHGDVVEVEITGVGTLRNRFVREGR

SEQ ID NO: 15213 - protein, 455 aa, BradyrhizobiumColbertium
MNRQMVLVGFLQAQNCTNLPSSWRHPDSRNDSMSADYYQEIARILEAGKFHMAFFDDRLAMPDRYGNDHAHTVEYGIRCVKMDPLIVLTTMGMVTEKLGLGATCSTTYYEPFDVARRFATLDLMSGGRAGWNVVTSLNDGEALNMGRDSHPEHDSRYDRADEFMEVVLGHWDTWEDGALIMDKTSGRFADPAKVKRLDHRGQAFKSRGPFTVPRSQQGHPVIIQAGASGRGQRFAGRWGEVIFTAARNLTAAKEGYASVRNEAAKAGRDPDQMFLCNLTTPVCAATKAEAEDKMALINKLPLEIDALSLLAEALNYDFASKGLDEPLTTEELKSMQGILGIRDGVLKSSGKSNPSARDFVTFSGRGQVQDAMVGGPREIADRLEEMFVERGCDGFVIAATHVPGSYADFVRHVVPELQRRGLFQEDYRGRTLRENLGLRRPAAGAWKVQPPEAAE

SEQ ID NO: 15214 - protein, 350 aa, BradyrhizobiumColbertium
MPIVKADRLRRISAALLRAAGASEEEADAVAIGCVNANLAGHDSHGVIAVPTYIDRIKAGHIVPGAKWTIVQESPTTTVIDGHWGFGFHVNARAMALTIEKAKTANVAACTVFRQSHVGRLAAYPLMAMREGMIGIATADSGRSPKHVAPFGGKEARLGTNPISIAVPSDLDTPFCLDMATSAVAAGKIQLAVARGQEIPTGWIIDAEGRHTTDPTQYRKGGALLPLGGTEGYKGSGLAAMVEVLCGLLTGLGFGVEPTGRHNDGCFMAVFNVAAFRPLKEFKREVAEFARYLKSTPPSEDSNGVFYPGEIEGLRQQQRLRDGIEIEDATWERLRALACEYRLDTVLDLA

SEQ ID NO: 15215 - protein, 310 aa, BradyrhizobiumColbertium
MPTTLARTFAALSAINEAILYAKSPDELYQKVCDAGFSSGDFLGVAVFLVGPDGRRLHFAAGCGDDVERLRSIGITTEAGTPEGSGVGGEAFREQKLCVSNDYLSDPRSLAWRESAAKAHIGAAAALPLLCDGKSVGVLYVTSGEANSLNEQMVSLFERMSANISYALDNFARETARQVSEQATRRLNRMFGAISATNEAILRAKTEQELYQLVCDASVHSGKSLATIVLLREPDSHWMVPVAATGQNLELVTQARYSVDPDNPYGKGISGEVFRTQKAIVEEDLASRTRGTPWEQAKVNTGVAACVIAR

SEQ ID NO: 15216 - protein, 1030 aa, BradyrhizobiumColbertium
MLRMAENVSFAIENFGREAEKASIAAGEERLARMYAALSATNEAILRAGSRTELFDLVCEATAKGAKFTSATIALADHHAELLRVVASYGPNADQVRNFTFSTSDRVPEGRGLTGTAFRSRQPAVSNDVLADDRMAPWQASAHRNGIASSAALPLLNGDRVEGVFLFNSPERGTFTPELVELLRKLQANVAFALESFDRADEKARADKQRNRLSGMFEALSATNEAIMRAKTREELFEAACQAAVLGDLFASATIGIIDDELQVVRVVAVKGRLQERMIGRTCSISAGHPEGEGIIGTSLRTRQPSVMNDYLNEPSSAHWRTKAVEDGTRAAASFPLLRGGQEPVGILLFLALEENTFTPDLVALLGRLAENVSFALDNFERAEEKARTEAQKERLTRMFASLSATNEAIMRAKSRAELFDLVCLAASNGAKFTSTTIALARAGTDQLEIVATAGPSADTTRNVRLSIDPERPEGRGMSGTAFRTRQPCISNDYLNDDRVRVFHAIVRGDGARSGAAFPLIVHDQAVGVMIYMSTEPATFTPEFVELLQRLAENVSFAMENFDRADAKKDADERIEYLASHDSLTDLPNRETFNGLLRDAIDAAQRRDHRFAVLFIDLDRFKVINDSLGHEAGDLLLLEVANRLRGALRTSDVVARLGGDEFVVILDQCGEIDAVQRIATELLAVLAEPMELAGHECHTTASIGIAMYPANGSDAQTLTKNADMAMYLAKEDGKNGYRFFSNEVKTQSIERLSLESALRRALEREQFSLNYQPKVDMETGQITGVEALLRWTHPDLGSISPAQFIPLAEETGLIVPIGRWVLNEACAQAMAWQRRGLLPLSMAVNLSPRQFADEHLLQDVDEALAASGMSPVLLQLEVTESMMMRNVGRALKVLDSIQSRGIRLAIDDFGTGYSSMSLMKHFPIDTIKIDRSFVRDLPQDSEDQAIAQAIISMGKALGMTVVAEGVENAEQETFLRTHGCDEMQGFLVSKPLPARQMAELLRPMVLPVAPPLQPESADEGAASRLKRAVV

SEQ ID NO: 15217 - protein, 113 aa, BradyrhizobiumColbertium
MHQAASLQFERVVNEFARWLAVPDNERSPAPAWWWGPAIAVRDAPQPMPRAWSRTLGLDDGSTFAGGASLLLALFEKQTSLPWPDDFPRKVESEAAESRELHPQPSDDSAFQP

SEQ ID NO: 15218 - protein, 330 aa, BradyrhizobiumColbertium
MTDRPTVLVTGGAGYIGSHACRALTAAGYQPVVYDNLSTGHRSFVDGPLVAGDLLDGAMLARAFADHRITAVMHFAAASLVGESMTDPQKYYINNVQGTLSLLQAMRNAGCHRIVFSSTGAVYGNADSKELPEDFPCTPINPYGASKLMIERMLADYRTAYGFGAFCLRYFNASGADPGGGIGELRDNETHLIPRAMMALQGHVDFAVFGDDYDTPDGTAIRDYIHVTDLAAAHVAALKLLEQGHAGASFNLGTGSGFSVREILDAIRQETGREVPHTVKPRRAGDPTYLVADPSAARKVLNFVPRHSDLPTIIRTAWAWHQKAHPFRSR

SEQ ID NO: 15219 - protein, 267 aa, BradyrhizobiumColbertium
MLERRVNLDGRAATADVPRITLGGLRLAALDLEATADFMIEATDPENRIGRPLFLTSANGEVLARCSTEPQTEYLFRAADLINADGQPLVAASKLQSWFPLPERVATTDLFHVVARKAEAVGRTFYMFGASEAENAAAVENVQKMYPRLKIVGRSHGYLRGEALRAKIEEINALAPDYLWVALGVPNEQAFVKEFTPHLSNVGVIKTSGGLFNFLSGSRSRAPQWMQKIGLEWAWRTLLEPRRLFWRYLTTNPRALYLLFSRNRPLR

SEQ ID NO: 15220 - protein, 790 aa, BradyrhizobiumColbertium
MLDYSQPIDRAAPEATQRKPQAGFNVLELANLLWRRKVAITAAALLGATLAVTIGKSITPRYTATAQLYVDPRELQLVDRELTPRAQDVSGMSMVVESQARLITSNSVLLQVIQQAGLEKDPEFGGGEGTSLTSSLLGLIGLHPRAPSAAQKKEVQLAALDALNKHITVRKTEKSFIVDVEVWSTDPAKAAMLANTLTSAYLAESRNSQASAARRATNDLSSRLKELRDRLRNAETALATYKAQNNFVGTQDALISDQQLSASNQRLSAARAATMDAQARLDQIEASRRTAADAGAIPEALQSPTIANLRAQYADARKKYAEQASELGPRHPALRQTEKQVEDLKRTINEEIDRFTQAAKNDLTRARDFEASLNRALEAQKRQSVQLSQAAVRLRELEREVDASRDVYQSFLKRSRETEEQESLNTSAARVIGEATVPQRRSFPPAMSLFAMIGFIFGAIAASGWFAAAELLLVGATTPAPSPARRERTPAPQPPTAAEPPRTAELTQPQPISRAPEVAQAPPELAAPPLQPSMFERPVIEKPLIARFQEADVIHTLGAILATGQSVDLTRLGWPTLRPGFALTALLNAWRDMREAASRRAGGKAMPVIALVSPGESSGRSVIALNFALAAARDGARVLMIDADHQARSLSNKVIRLGRTEPSKLGWLSIGSKAAREIKTVNGVSVLPAAEADAGKAAAAIRKAITQARSAAGYDLVILDGPAMPLSAGGRKLLDDTDSLVAVLPTDLDINDSLEEILAALGPAERKLVGVVLDELAPEIQTRQRGKQYA

SEQ ID NO: 15221 - protein, 266 aa, BradyrhizobiumColbertium
MNKPATIDFATATAINVPTAAPPTQALHDLVPGEARDSLLAVHDVLRRELPRDQLAIYEAGGGSCSVLPPELLNRSKVTVVDIDEDQVRNNTYADEAILGDIQTYRFGRETFDLVICYNVIEHLPNVDTALLNFRDALKRGGMILIGAPNPRSLSGVVTKYSPHWFHVWFYRHIRGIKDAGLPGEPPFPTFFHPLVTLPRLEAFAAANGLEMIYRREVESPRYPEMRRRKPLFAALVDAGAAVLNAVLPSGTDVRRGDYHVILRKS

SEQ ID NO: 15222 - protein, 47 aa, BradyrhizobiumColbertium
MVLRGDGSVRRRVLFIFGTNPFCGDVPLRDVPACAIEAGLSQHISDI

SEQ ID NO: 15223 - protein, 342 aa, BradyrhizobiumColbertium
MTLIPTDLSAARLSDAVCDSNREIAASSRIIDLSVGIVVCIPCFRRPQHLRLTLESLANQRTPRSFAVVMVENDAARRESAPVAAEFLADGRLQGVCLVEKRQGNCHAINAAFETAQTLFPAATRFLMIDDDEIASPDWLELMVRTAEATGADVVGGPVLPVFDDDSKPWLARHPAFCPTYDYSGAVPLIYGCGNCLITRAAFERFDRPAFDLRFNFLGGGDCDFFVRCRDAGLLFHWTAEAVITETVPRNRTSLGWIAKRGLRIGAINYRVQYKAARSRAARARVFVQMLGRVPLSLARAAALLTSSKAVVAMHPVMVALGAALAAVGLEQKPYEASKIVS

SEQ ID NO: 15224 - protein, 328 aa, BradyrhizobiumColbertium
MITAEDVLELPAAPRATAPARLPLQVDSATSVSVVIPAKNVAAYIGETLVSALAQREVTEVIVVDDGSTDETVAIVRAVRDSRLRLIHNDSAGVSAARNFGARHASGAWLLFLDADDRLRPGAVAALLSAARGAPRAVLIYGDYNTIDAEGRQIGRRELLKGRRKPSGDVLSRLAAGNFIVNGGIVLTRADAFRAIGGFDVSLRYCEDWHCWCRLASIGEFEFVPKLLLDYRLHTANTMNAAVRTPQDFLPAVARIFDDGLILARLPEDAASGLRRAAEIHLVTYSAMQAVRFGRYRDAFAYLAMIGRRSPRSLPRAAIRVALARFGI

SEQ ID NO: 15225 - protein, 367 aa, BradyrhizobiumColbertium
MPAKTFEHDPDAMILNLFYEDKDDRWFPGDRHLRRMARRLLLGEPRMSGQLRVFLNLCAGLDRLGIRYRVNDYGHVARHPEELACIIGRTFLLDKFAWKNPILLGVAAHNHPLDDPDLFRRLPVKKVVVPGRWYVDMYRPYWPETEAWPVGIDTDFWAPSESSQKTIDVLIYDKVYWDRERYVPALIEPLRARLLKEGRSFTELRYGSYKEADYRAALARSRAMIFLCQSESQGIAYQQALSCGVPVFAWDPGGPWRDPDYYPHRVRFEPVSSVPYWDERCGAKFTDITGFEAGWGNFWAGCAAGTFDPRGYILDNLTLEQRALQYYEIACGIMRRPAVAKASGGAVDGCSAGASQGLELLRHHQMS

SEQ ID NO: 15226 - protein, 450 aa, BradyrhizobiumColbertium
MDRSAADMTAAQTRSSGHMLREALAGLDAVQAARCLVAAAALLLVLVTLDPFPDLRNPDVTTIVGGRMALTYVSWGLLAGVAVLLVAATDAPALKTLATPLHLCLLGWLVINIVFSESRGVSMQRFVLAASVTSIAVLLPLLPPTQRSFNLCLGATALVLLALCYLGVLLAPQYSMHTALDVTEPQLAGDWRGSFGHKNVASPVMTILVYVGIYLSAVGSFVMGPAIAALAGIFLIFTGGKTSSVLCLAIYVLASLVYVTPSLWMKRIICFVPLVAMNLLTVGSALSPALAAMTRLLPLDPTFTGRSAIWEFALAAVAEKPIIGHGYAAFWDDVTSRQTAQGAEWATSAAHSHNSYLDLAVTIGLPGLMLVILVFVLAPLGNFQTAQAHSRSGALAKLFLTVWLFGLYYGATETFLLDRQNPVWFLFALAVAGLHFLARFQCVEQAEMER

SEQ ID NO: 15227 - protein, 381 aa, BradyrhizobiumColbertium
MTFPSIEQSEGRISSASGVAVDFMRDWRQAASRLNAGHRTAFQHGDWLGAWYEAFQDVAPLIAVISDVATGKDIAILPMISHVRRGIRIVEFADLGVSDNNAPILACDAALDAGATDAINAALIDALRALPDRLDLLRMRKMPAWIEGEPNPFVALGRLGSSSLNGNLVLMGDDYGAYQASIKRMQMPRCWRVFSRHEGARFEIATDVARAHELLDVMDGQQQARMQKLGSRFVLNDESHARFYREVARRGLAEGYAVVSALVCDAGVIGTSFGVRQGATYYLLRISHAGDPWSSCSPGLLVIERTMAALHARGVRRFDLSIGNQDYKRRFGAERVPLTDVSVALSWRGLPYAWRDHGAQGLRRHPRLAALAARAMGKGKR

SEQ ID NO: 15228 - protein, 199 aa, BradyrhizobiumColbertium
MTKVLVLYYSAYGHIEAMANAVAEGAREAGAIVDIKRVPELVPADVAKASHYKLDQAAPIAKIEDLASYDAIIVGTGTRFGRMASQMANFLDQAGGLWAKGSLHGKVGGAFTSTATQHGGQETTLFSIITNLLHFGMVVVGMNYGFAGQMKLDEVTGGAPYGATTITGGDGSRQPSANELAGARYQGRQIAETAKKLHG

SEQ ID NO: 15229 - protein, 232 aa, BradyrhizobiumColbertium
MIELRPFAKLGGADHGWLKAKHHFSFASHYDPNNMGHGALRVWNDDEIAPNTGFPAHPHANMEIITYVREGAITHQDSLGNEGRTEAGDVQVMSAGSGIRHSEYNLEPTRTRIFQIWIEPTERGGQPTWGSKPFPKADRSGKLVTIASGFADDTDALPIRADARVLATTLRAGESAEYEPQTSRHLYLVPALGAVEINGVRVNARDGAAIRDEARLKITALEDSELVLVDAA

SEQ ID NO: 15230 - protein, 311 aa, BradyrhizobiumColbertium
MAKLPDFEALAIFAKVVELRSFAGAASELAMSKATVSKAVTRLEERLGARLFNRTSRRLALTDAGHKLAERATRLLADGEAAENEALAQSIAPRGLVRLAVPMTFGIKAVAPLLPEFFATYPEVSVDLHLSDATVDLIGEGFDMAVRIARLPDSSLIARRLFTMPRYTVAAPSYLKRHGRPTHPMHLAEHKCFSYAYLSTPNVWHYTNSAGEQASVRPGGQLRVNNGEAVMPALIAGLGIAELPEFIVGEAISSGEVEVILKDWKQAEGAVHLVTPPGGPRPARVEALGDFLAANLPGMCKRRTRGKAKTA

SEQ ID NO: 15231 - protein, 85 aa, BradyrhizobiumColbertium
MGKLATVDVALDEMLVNLAAIILRLAKPELTQTPEARRALAQSVHQYAVCAKRSSDPRVHELKSQLEQTLKPSLRIVAIDGEKVA

SEQ ID NO: 15232 - protein, 49 aa, BradyrhizobiumColbertium
MPTTRPAHARTGVVGILHNRLLVTTALAPLAHAAAADAEAGAGGVRSES

SEQ ID NO: 15233 - protein, 114 aa, BradyrhizobiumColbertium
MRTELALLGVVLAIGGIGAQSAASAQEYRGTMEQQMACTPDVWRLCSDQIPDVNRIVACLQQNTPQLSSGCRGVFQSNNQVQPQQPTPRNRVTPPPRYNAAPPPTQSQPYDEDE

SEQ ID NO: 15234 - protein, 155 aa, BradyrhizobiumColbertium
MSLESVRAFFAENAPDISVIESPISSATVALAAEAYGVEPGRIAKTLSLRIGERVILIVASGTSRMDNKKVKAQFGGKPKMLGLEEVADITGHEVGGVCPFGLKSPLPVYCDVSLKAFDVVVPAAGSTHSAVRITPERMAELTAAEWVDVCEHRP

SEQ ID NO: 15235 - protein, 243 aa, BradyrhizobiumColbertium
MSLKAVVFDAYGTLYDIQSVAEITEDAFPGYGEIITQVWRIKQLEYTWLRSLMRRYLDFAAITRDSLAYTLRVLGLAYESEVFERVIEKYLHLDLYPDATATLAALRPRKLAILSNGSPDMLDALVRNSGLEALLDATISVDAKKIFKPSPQAYELIGEVLGTAPNEVLFVSSNPWDAAGAKSFGLNVAWIDRVTPEAMALACVENEAVAPLTMFKAIRTQMDELGFAPDHRIRSLSELPRIA

SEQ ID NO: 15236 - protein, 96 aa, BradyrhizobiumColbertium
MSNFKITLARIEMISPNERGEDMGLTFRFERDQTSFTLPIFLNSREFDDTEMVKVARSKLHDVFEQLFTQCEDWQLSDAERRELARLNVRPEAPIP

SEQ ID NO: 15237 - protein, 72 aa, BradyrhizobiumColbertium
MHFWGSDSAIEASFFIEEDALKRLQPGACHEADFLNAFDRNRGVICATAAKVYVRGSRGSYDLVANQFSKGA

SEQ ID NO: 15238 - protein, 287 aa, BradyrhizobiumColbertium
MITLDIQHTTTYRFDEPVGLLPHRLMLRPRESRDVRLLSSRISASPDAVLSWASDVFGNTVTTATFATKASTLVISSVAKLQLASVEWPIFDIAVSATSYPFFYSDHDWADLGALASPQFADPEGTLRNWARMFVRGSQTDTLALLKDLSVGTSEAVRYQSRDEEGTQTPLETLSRGWGSCRDLAVLFTEAARVLGFGARIVSGYLYSPSQQSAGSGGAGSTHAWAEIFVPGAGWITFDPTNRSLGGFNLVPIAVARDIRQIAPVSGSYIGSTHAFAGMSVEVLVTS

SEQ ID NO: 15239 - protein, 334 aa, BradyrhizobiumColbertium
MTVPHVRFPRILSKCLVAFQRHPALATVAGAATLMAGAALINRKFAKKAQRDNPPQGRFIEVNGVRLHYVERGNGRPLVLFHGNGSMIQDFQSSGLIDRAAETYRVIVFDRPGFGHSLRPRNVVWTPEAQADLFKVALDQLNVDRAIVLGHSWGASVAVALAIRHPSSVEALVLASGYYFPTARSDSATSLLPATPGLGDIISYTASPLLGRLMWPAMLKKLFGPQPAPGKFAGFPRDMALRPGQMRAGAAEAALMVPGAFSAEKTYSELGMPTIIIAGEGDRLIDINEQSAKLHGEVKQSKLHRIAGVGHMIHQSAMPDVMAAIDEAAAQTVH

SEQ ID NO: 15240 - protein, 85 aa, BradyrhizobiumColbertium
MTIRSRRETVTFKHPFHIRGIARELPAGRYEVVTDEEMIDGLSFAAWRRVATMITVPSKDVQGATEIRAISSVDLADAQRTDVNR

SEQ ID NO: 15241 - protein, 55 aa, BradyrhizobiumColbertium
MKHDHVVLAQERAIWHCWTSEWIVPPIVVPVFLLLLVVQRHSSIASATRSYRVTS

SEQ ID NO: 15242 - protein, 326 aa, BradyrhizobiumColbertium
MPVWHEKHLRAATRAAGVALWSWNVDTDAITMDEAAYDLWDVSKEERTITFEILSRNIHPADLERVRSAFSATRAVVGAYEIDFRILSGGDVRWISARGQGDDADIAERVMFGIFLDVTQRKQAEEANELLAGEMSHRVKNLLTIATALTQITSRSAETKEEMAQELTSRLIALGRAQDLIRRIPGQKTGATLLGDLISVLLAPYDEKGASVRIRVSVPKMTVGESSSTALALVIHELATNSAKYGALSVSSGTLDVSCNAHEDEVVVMWTERGGPPVVAPTKLHGFGSKMVHRSMASQLGGTIAFEWSDEGVVVALRMSKHSLAD

SEQ ID NO: 15243 - protein, 294 aa, BradyrhizobiumColbertium
MPKLKLPNIDDVVAIDIHTHAEEPCGTHPDDGYDDFQAQMAEYFKSPHKHPPTVPETAAYYRSKNIAAVIFPVDAERETGFRRYKNEEMLEIASEHLDVLIPFVSIDPHKGKLGAREARKLIEEYGVRGFKFHPTMQGFYANDRMAYPLYEEINNGGAIALFHTGQTGVGSGMPGGMGMRLKYSNPMYMDDVAADFPDLKIILAHPSFPWQEEALSVATHKPNVYIDLSGWSPKYFPPILVRYINSILQDKMLFGSDWPVITPDRWLSDFAKIDIRDEIRPKVLKANARKLLGI

SEQ ID NO: 15244 - protein, 41 aa, BradyrhizobiumColbertium
MKVRNSLKSLRGRHRANRLVRRKGRVYVINKVQRRFKARQG

SEQ ID NO: 15245 - protein, 189 aa, BradyrhizobiumColbertium
MAPALAQQVEPPGKQKKLPEAPAKLPKVDRSKNLDFLFGALKAAPDETSAKHVEARIWAVWLQTPSDTAALLMARAKTAVDAKKIEVAIKLLDSVIKLRPDYIEAWNRRATLYYMQNDYGRSLSDIQQVLIREPRHFGALAGLGMIMQEVGNEKRALDAYRKALAVNPHLEKIPDQVKALTEKVEGRDI

SEQ ID NO: 15246 - protein, 37 aa, BradyrhizobiumColbertium
MAFAPAVDVGLQSAAQQPRCATAAIVVNRRRLQSLKK

SEQ ID NO: 15247 - protein, 82 aa, BradyrhizobiumColbertium
MVAAVLLLGSGTVSFADGLFWVVGNRATGKCNIVTSNPVIAGDIFFGDGPYKSRADAKLARSTIRVCPAVTPEDEKEEDGTN

SEQ ID NO: 15248 - protein, 60 aa, BradyrhizobiumColbertium
MSFRSSDTAIDEIVASCNGDLRGAVRALLLINEHLETELARAYAAAADRGLVERGGNVLH

SEQ ID NO: 15249 - protein, 318 aa, BradyrhizobiumColbertium
MIVMSAVTALVLLALVTQVGIVAVQRAFPPQGRMIEVDGATLHVVDLGPREAGLPVVMLHGASSNLEAMRRPLGDILAEDRRVVLIDRPGHGWSSRARRQDSTPQIQARMIDEALHKLGIDRAVFVVHSWSGALGARIALDHPHRVAGLVMLAPVTHPWRGGVGRYNEIIATPVIGPLLAYTITLPLGYVLAESGARNVFLPQTMPDGFVKDSATPLLLRPREFIANAHDLVTLKEAVAAQVARYGEISAPVTIIAGEPDKTVSTNIHARPFAAMVPNAKLIVRPGLGHMVQNAVPDLVKAEIETMIGKIVPAQAAAD

SEQ ID NO: 15250 - protein, 131 aa, BradyrhizobiumColbertium
MTKLTFGALTILTAIATAPAAMAQDVAAGKTSFNKCLACHAIGEGAKNKVGPELNGLKGRKSGTVEGYNYTDANKNSGITWDEATFKEYIKDPKAKIPGTKMAFAGIKNETEIANLWAFIAQYDKDGKIKQ

SEQ ID NO: 15251 - protein, 497 aa, BradyrhizobiumColbertium
MAIMMPASDQAVLARRAEIIAALRAIVPGEGVIDSAAEMRAYESDGLTAYRQPPMVVVLPDTTEQVSLVLKYCAEQSIKVVPRGSGTSLSGGALPLEDGVLLGLGKFKRIREIDFDNRVVVTEPGVTNLAISQAVAHAGFYYAPDPSSQIACSIGGNVAENSGGVHCLKYGMTTNNVLGCEIVLMSGEILRIGGKSAENPGYDLMGVITGSEGLLGVITEITVRILQKPETARALMVGFAEVEAAGECVARIIGAGIIPGGMEMMDKPAIHAAEAFVHAGYPLDVEALLIIELDGPKIEVDELIARVEAIANACGSTTCRISTSEAERNLFWAGRKAAFPAVGRISPDYLCMDGTIPRGALPKALARIRELSEKYQLGCANVFHAGDGNLHPLILYDANKPGEIERAEAFGADILRACVEFGGVLTGEHGVGIEKRDLMPDMFSEIDLNQQQRLKCAFDSQGLLNPGKVFPTLHRCAELGRMHVHAGKLAFPDIPRF

SEQ ID NO: 15252 - protein, 412 aa, BradyrhizobiumColbertium
MDTLRVRDAKDVEEVVRAAIANEQPLEIIGHGSKRSIGHAMATNAVLDVSALNAVTSYEPNELIVTLQAGAPLGDVQSLIDAKNQQFAFEPMNTAPLLGTPMSGTIGGMIAAGLAGPRRIRAGGARDHLLGAHAVSGFGDSFKTGGKVVKNVTGYDLCKLLAGSWGTLSVMTEVTLKVMPKPEAERTLLLRGMDDAAANKAMTVALGSPFDVSGAAHLPKSELRAKVEGLGDVAGEGEPLTVLRLEGIMASVAHRAGSLRELLVSFGTATLVEDGASAALWTTIRDVLPFAATGALGAWPVWRIVCPPASGAALGTQLARETGGDLIYDWGGGLIWAALPPKSDAHAPVVRARVSAAGGHATLIRAEEEVRRDVDVFHPQEPGIAALSERVRASFDPKAILNRGRLSRGATA

SEQ ID NO: 15253 - protein, 440 aa, BradyrhizobiumColbertium
MKTEFSLAQLADPEIAEADKILRACVHCGFCTATCPTYVLLGDELDSPRGRIYLIKEMLEKDQAPTAEVVKHIDRCLSCLACMTTCPSGVNYMHLVDQARVRIEQRYQRPLTERLLRRVLAFVLPDPQRFRLSMWLARLARPLGVLLPTPRPSATPGLIHRIKAMLALAPNRLPPAGPAAGSVFAALGKKRGRVALLQGCAQQVLAPRINQAAINLLTRHGIEVVLVRDEQCCGALTHHLGDDQDALARARANVAAWRKEAAGEGLDAILVTTSGCGTVIKDYGYLLREEAAFAADAAKVSSLAKDITEYVAGLELSTAARQENIVVAYHSACSLQHGQKITSLPKELLSKNGFVVKDVPESHLCCGSAGTYNILQPELAGRLRDRKVANIVSVKPDMIAAGNIGCMVQIASGTSVPVVHTIELLDWATGGSRPALNAQV

SEQ ID NO: 15254 - protein, 125 aa, BradyrhizobiumColbertium
MAKAKKKKSKKARKAKKAVAAKKATKKAAKKSAKRSAKKATKKTAKKSAKKAAPKKAAKKGAAKSARKAAPKKAARKAAPKKAKAAPAPKPSAPAEAPAAEPAAETSWAMPSPSAEPAAAAEGQG

SEQ ID NO: 15255 - protein, 341 aa, BradyrhizobiumColbertium
MGIEMKKVALLATALAMVTTGSAFAADLRVKALKAPPPPAFDPWDIAFGGAIMSNYVFRGITQSNHKPSVAAYFEPRYNVTKDLQLYIGLAGESISFPNRAAAEIDVYGGIRPTFGAFAFDIGVWGYLYPGGTCYYGAATDTAGNPLAECAANALLNGNVMKRDVSFFEVYGKMTYTVNDNWAFGISEFYSPNFLNTGAWGNYTSVTAKWIAPSTTFGASGVGMYVSGEFGRQWFGTSDSFYGTGIASPLGGGPFPNGIKYADYNTWNIGVGFTYKVMTLDLRYSDTDLSRGDCNAFTSDYTAGGTTNATPINPGGAGSKWCGATGIAKLSFDLTAMTNLK

SEQ ID NO: 15256 - protein, 585 aa, BradyrhizobiumColbertium
MKNISATLAIVWRIAAPYFRSEDKWAGRGLLAAVVAMELALVAIDVLVNQWQNRFYSALQTSDWDTFVREIWIFIALAFTYIALAVYKLYLNQWLQIRWRQWLTRHYLGEWLQNATHYRMQLKGDAADNPDQRITEDVKNFVEQTLSIGLGLLSSIVTLFSFVIILWGLSNAAPLRLFGTDVMIPGYLCWGALIYAIFGTALTHWIGAPLVNLNFEQQRYEADFRFNLVRVRENSEQIALLNGEGAERARLLDRFGFVIANWYAIMSRTKRLTAFTASYQQAAVIFPYVLVAPAFFAKKIQLGDMMQTASAFSSVQGALSFFVTAYRSLAEWRSIVARLDGFEMSVDSAANLPLHEPAIALEVAGSSGHIELEQLCVNLPNGTPLVAAKGFAIQTSERVLVTGPSGSGKSTLFRAIAGVWPFGTGTVVIPEKAKLMMLPQRPYFPVGMLRDAVVYPAAPGAFAPAQVRDALVAVGLPGLAERLEEEGHWNRMLSLGEQQRLGLARALLHMPDYLFLDEATASLDEPSEARLYRLLAEKLPQATIVSIGHRSTLDAFHTRKVALVKDGTIHVLGGERAAAEPSAAR

SEQ ID NO: 15257 - protein, 554 aa, BradyrhizobiumColbertium
MWNQVYDPLNSPVLSTIAAAVPVVTLLVLIASGRVQAHIAAIIAVIVANLITIFVFTMPANMSIRASVLGVVTGFFPIGWIVLNVIFLYQVTVATGRFELLKRAVGGVTEDRRLQLLLIAFSFGAFFEGASGFGTPVAITGAVLIGLGFSPLAASGLSLIANTAPVAYGALGTPIQGLSSVTGIDPYILGAMVGRQLPVFSLIVPFWVVWAFAGWKGMKDVWPAIFVTGISFAVPQFVISNYINPWIVDIGASLISMGALILFLKVWQPKQLWLSPALRGNDESAATMAAARPLDKTPLTQSELFSALLPWIIVCIVMLIWGNGGFKAWANSIFVWNYPVPELHQMINKMPPVAPGPTKESAVFAFTYLSFTGTGMLIAAIIAGILMGVGPGKLAAEYGRTIRLCAISLITISAMLAIGTLTRLSGVDATLGLAFAATGVLYPFFGTLLGWLGVALTGSDTASNVLFGNLQKITSEQLGLSPVLMAAANSSGGVMGKMIYAQSIVVASTATNWYGHEGTILRFVFWHSIVLACLVGVLVTLQAYVWPFTELVLK

SEQ ID NO: 15258 - protein, 219 aa, BradyrhizobiumColbertium
MELQTMPTITAFESSPDRGRGQARDMRVRWALEEVGQPYDVRLVSFEDLKQPPHRALHPFGQIPTYEDGDLALFESGAIVLHIAERHAGLLPLDANGRCRAIARMFAALNTVEPPIVELGMAMLLERDRSWYAERLPMLQDRVRVRLGELSCHLGNAEWLDGAFSAGDLMMVTVLRRLNTSGLLEEYPDLAAYVARGEARPAFQQAFAAQLAVFNAARS

SEQ ID NO: 15259 - protein, 130 aa, BradyrhizobiumColbertium
MSDDLSGVWDGSYIQPGVGMITFTATLVETGGALSGSVTEPCMMPGCPVSTHNSSISGHRSGSAVSFIKRYEPPGFGYDRVTYEGTVNAEATEIDGRWRLPGHSGSFLMIRAGKPAQAVTTERRAKEPAR

SEQ ID NO: 15260 - protein, 144 aa, BradyrhizobiumColbertium
MKIASTFRAALLVIAALAGLSSAARADSGFVTLTIYKAGWIIGGSGGSGVLNFRGRTYALSTGGLDYGLVFGGSKTVLRGRVSNINRPSDVAGVSGAAGAGLAVGRGARAIVLTNQKGAVLELTGHQVGLMANADLSGFAITMR

SEQ ID NO: 15261 - protein, 127 aa, BradyrhizobiumColbertium
MPIQHFAPPPHVQAPPLSFATRVGDLLFVSGIPGFDASGALPDGFEAQFANVVVNIRRVLGEAGATFRDLVKVNVLLTRAGDVAAMNALYAGAFGPPPYPARTTCVVQALPRPEMLIEIEAVASLAG

SEQ ID NO: 15262 - protein, 86 aa, BradyrhizobiumColbertium
MRRVLALCAVAGIASSVFAVPASAKVGYYVIRWDNTGICQVWNEDLQYKPLQIGVSTYKVVSKSFPTFQQASDLQIKMRAERKCTL

SEQ ID NO: 15263 - protein, 83 aa, BradyrhizobiumColbertium
MRRISVLCAAAGLAVTAFVAASPAEAGYHLIRWQDSGFCQIWDESIPTTPWPAGYHRASASVPTFIDALVLKDAALKSGSCTW

SEQ ID NO: 15264 - protein, 161 aa, BradyrhizobiumColbertium
MMERLDPWKLALERLRSAHSPDWAEAGRLVAEIARMSSDVTLRQAAEQALPVLRQAVDNDDHSVTLAAQRRLGVVLEVVHDLTAPRFGRRNAMPKKLSSEDRARKMLGLPLAVQLTCEDINQAYRRAAKGMHPDHGGSAQAFIDLAAARDILIHPGAHKDA

SEQ ID NO: 15265 - protein, 255 aa, BradyrhizobiumColbertium
MAQLANHIAVVTGAGSGIGRAIAAGYAREGAQVVLLDVNADTVAEAAQEIRKAGGKAESFALDVTRREDCFALAKQVEGKVGQVSILVNNAGITRRNAFTAETETVAKDWNDIISLNLNGVFNMTQAFLAPLRASKGRIVNIGSIQSFVHLRTPSSAAYTTSKHGVLGFTKALAAELGKEGVRVNAIGPGFIETNINANVRATNPALVQAFLDHTPLARTGKPEDIVGPAIFLASDMSAYVTGTIVMVDGGYRTV

SEQ ID NO: 15266 - protein, 82 aa, BradyrhizobiumColbertium
MTTVHVAASESAAQFLAPNQVVPLLIGATVDEVERELVLQTLARCDGNRTRASRVLGLSVRTLRNKIRLYAASGIDVPACQD

SEQ ID NO: 15267 - protein, 172 aa, BradyrhizobiumColbertium
MADDQGRRPGPQGPRGRQGEPGRPGPQGHPGRRGPDGARGKPGPQGKPGPVGKAGPPGKPGPQGKQGEAGPRGPAGPQGPAGPQGPAGPQGPRGEPGPPGQLPSIEQVLPWLEQLFDAWDERRRQREREAAERDALEAAVREVDEPVADHESDDGESGEHKKRKRKKKHGKD

SEQ ID NO: 15268 - protein, 73 aa, BradyrhizobiumColbertium
MSRPLLPLKAGAVAFTVLWTAWMMWWSGSYSSVNLVILTLLGTMVGYLWYRAMRWQFERMGMLPRKDDPSGAS

SEQ ID NO: 15269 - protein, 88 aa, BradyrhizobiumColbertium
MCRNIKTLFNFEPPATEDEIHASALQFVRKLSGFNKPSQANEEVFERAVAEVSDAARRLLTSLHTHAPARDREVEAEKAKERSRLRFG

SEQ ID NO: 15270 - protein, 116 aa, BradyrhizobiumColbertium
MHRLALCVWLAATMLTNTAFARDNGQYDHVPPDIRAWFKSVIAPNGVPCCDISDGHRTEYDVRNGAYWVPIEGQWTEVPERAIIRNRGNPVGQAVVWYVHHRGAVIISCFVPADAV

SEQ ID NO: 15271 - protein, 209 aa, BradyrhizobiumColbertium
MPSYSGAMPLTDLSAKDLAAIYAKPTPRVIAKARPAIDAHARKFIEMSPFCVLATSGADGSVDASPRGGSIGFVRVAGPNRLLMPDRSGNNRIDSFRNVVEGSGFVHLLFFVPGIDETLRVGGRGTLSADPDLLATMVEFGKPPRAVLNVAVSEVYFHCGKALMRSKLWSPEKVQRSVMPSIVEVIHDQTGLGEPQSQQAVEELYKTQL

SEQ ID NO: 15272 - protein, 162 aa, BradyrhizobiumColbertium
MQGDAKVIDYLNKALRHELTAINQYWLHYRFLDNWGLLDMAKVWRKESIEEMEHADKLTARILFLDGFPNMQVLDPLRIGQNVKEIIECDLAAEMSARALYQEAATYCHGAKDYVTRDLFEKLMSDEEHHIDFLETQLDLIGRIGLELYTQKHVGGLEGEGH

SEQ ID NO: 15273 - protein, 90 aa, BradyrhizobiumColbertium
MIVCSCNVLSDDDIRAAVAESDDAVRHAKQVYGCLGCSAECGRCARTIKTIIDEALGPCADSCCAGCPHSHAVAANDETAEPAEFALAAC

SEQ ID NO: 15274 - protein, 107 aa, BradyrhizobiumColbertium
MKKPLLAVVAVATLALTAGTPAQAQRRRAAGVAAGIIGGAIVGGALASPYYYGPGPGYYEPGYYPPRYYAPAPAYVVDDYYGGRRIWQKQRFWDGYAWRARRVRVCR

SEQ ID NO: 15275 - protein, 94 aa, BradyrhizobiumColbertium
MKKTLVAVLTVATVAGSLVTATPSAKAHDGIGAGIAAGLIGGAIVGGAIASSRPAYGGPVYVAEPGPPPPPCYWQRQRYWDGYGWVVRPVRVCY

SEQ ID NO: 15276 - protein, 408 aa, BradyrhizobiumColbertium
MMRRTFIAALILLTCGSTSGRAADAGFTQFIASLWPEAQAAGVSRMTFERETRGLEPDYKLPDLLLPGRPATGAPSQAEFVQVPADYVKEASIARLAGEGQRLLQKYRPVLTEIEKNSGVPATVMLAIWGRETDYGRYRLPYDLVRVLATQAYVGRRKDQYRNEFILSLKLLGEGVVTRKDMRSSWAGATGLTQFLPSEYYKHGVDSDGDGRIDIWRSVPDALASAAQQLVNKGWQSGVRWAYEVQAPAKVDCTMGVPEVTKPIGQWLREGFVPVRGQKLSAAEQAQPASLLQPEGIYGPSFLTTKNYFVIKEYNFSDLYVLFVGHLSDRMTSPLPFATRWSASRQLRTKDVEIMQRELTRVGLYKDKIDGKAGMQTRAALGAYQKSAGLKVDCWPSEDVLRAVQAAR

SEQ ID NO: 15277 - protein, 549 aa, BradyrhizobiumColbertium
MARQFIYFMQGLTKSYPTRKVLDNIHLSFYPDAKIGVLGVNGSGKSTLLRIMAGLDKEYTGEAWVAEGARVGYLEQEPQLDPKLSVRENVMQGVAKQKAILDRYNELAVNYSEETADEMTKLQDEIEAQGLWDLDSKVDQAMDALRCPPDDADVTKLSGGERRRVALCKLLLDQPELLLLDEPTNHLDAESVSWLEGHLRNYPGAILIVTHDRYFLDNVTGWILELDRGRGIPYEGNYSSWLVQKQKRLEQEGREDAAHQKTLAREQEWVASSPKARQAKSKARYQRYEELLKKASEKQTQTAQIIIPVAERLGANVVDFDGLSKGFGDRLLIDNLTFKLPPGGIVGVIGPNGAGKTTLFRMITGQEKPDAGTITVGETVHLGYVDQSRDALDGKKTVWEEISGGNELILLGKKEVNSRGYCSAFNFKGADQQKKVGALSGGERNRVHLAKMLKSGANVLLLDEPTNDLDVDTLRALEEALEDFAGCAVIISHDRWFLDRIATHILAFEGDSHVEWFEGNFQDYEKDKMRRLGQDSIIPHRVKYKKLTR

SEQ ID NO: 15278 - protein, 40 aa, BradyrhizobiumColbertium
MLAADVTIPPPKGNVFRPFTTDEYGPDTISPLIRTIETIF

SEQ ID NO: 15279 - protein, 71 aa, BradyrhizobiumColbertium
MSLTETSSLHAPAEAGHVSGFVSEIQGFWKRFFAAAFNPYRPELHYMRGPGPAWRAKHGMDAPLRLKPRNF

SEQ ID NO: 15280 - protein, 320 aa, BradyrhizobiumColbertium
MSRLRCAILDDYFNLALDVADWSKLSDRVDVTVFRHPFASEQAAASALADFDIICAMRERTGFPKSLIEGLPKLKLLLTSGMRNAAIDMQAAKARGIAVGGTQYSRDPTAPLAMGLILELTRGIGRENARMHAGEPWQSFAGVEIEGMTLGIVGLGKLGSKMAGIAKAFGMNVIAWSPNLTPEKCGEVGVGYASKDELFAKADIVTIHVVLSERSRGLVSRADLARMKPTAFLVNTSRGPIVDEQALLEALQQRQIAGAGLDVFAVEPLPIDHPFRKLDNLVLTPHLGYATSDGLRAHYGQMVEAIDAFTRSGELPRKLA

SEQ ID NO: 15281 - protein, 405 aa, BradyrhizobiumColbertium
MMIKHFLTICAAATVAAAGTSLAQAQSYPVQQVPGYGAPAEYRPGDRVPNFDALDEDDEAMPQASLPPPGPADDPRYGRPMGGPPVYSAAPPQGPVMSPDDPRYGRPAGATPVYSAAPPQGPVMSPDDPRYGRPADPPPVIYANRPGQQAPGNDGLRPPEAVGGPAATGTVQAAQPPVGADGRPITLAALPPEEQPDAAPVQLPPNLRRQEVAFQTKEPVGTLVVDTSNTYLYYVLGNGRAIRYGVRVGRDGFTWTGVQKITRKAEWPDWHPPTEMIERQPYLPRFMAGGPGNPLGARAMYLGSTVYRIHGTNQPSTIGKFVSSGCIGMLNEDVSDLFERVKVGTRVVVLPGGPPPGTATASAAPTPGAAAPGTAGPAPMSAQAGPVPGTQPTVVPPLPAPVTVR

SEQ ID NO: 15282 - protein, 256 aa, BradyrhizobiumColbertium
MLPGFRFLFAAILLSTSILVFGLGAAALLRATHQQYVSNPSWRNGPQEQVFAQAPEPAQPVLAVLRAEPDEPVAAAPEPSLRDQIPTIGLPAQEAEQVAALTPEPDPQPEMTATPTEVAAIRPVEPEAAAEVAEATPRDTLTPDDTTASIPQAAPASATSESAPAQVGAALPSSALEDTSTKLSALNDPTATSVKDTAAKAKVDAKPDSKAIKSKAKVKKRPRVVRRPPPQQLQQQLDPFGQPQPAFATTTTARSR

SEQ ID NO: 15283 - protein, 285 aa, BradyrhizobiumColbertium
MIAPTDPLVSTEWLAAHINDGNVKILDASFKLPGVLPLPKDDYLAAHLPGAVFFDVDAVSDHSNPLPHMFPSAEQFGRDVGNLGISNADTVVLYDAGGWVAAPRAWWMFLSYGHSNVRILNGGLKKWRAEGRPVESGDVKPKPATFEASYDSKRVRSMQQLIANVESRAEQVIDARAADRFEGRAPEPRPGIRSGHIPGARNVPYNLLFDTATGTMKPLDDLRAAFAGAGVKLDAPIVTSCGSGVSAGVLTLALYRLGITDTALYDGSWSEWGQADGPPIATGPA

SEQ ID NO: 15284 - protein, 137 aa, BradyrhizobiumColbertium
MPQTITRGIKALIDEANAEIETLSAKDAIEISKNGDVVIVDIRDPREIERDGRIPGAFACTRGMLEFWIDPQSPYAKPIFQEDKKFVFHCAGGLRSALAAKTAQDMGLKPVAHIAGGYAAWRDAGGPTEKWEPKKKG

SEQ ID NO: 15285 - protein, 391 aa, BradyrhizobiumColbertium
MFLQFFTSLRDAQVPVTLREYLTLMEALDADLADYTVENFYYLSRASLVKDERNLDKFDRVFGTVFKGLENLLDAMEKAEIPEEWLKKLAEKYLTEEEKKQIEAMGWDKLMETLKKRLEEQKGRHQGGSKWIGTAGTSPFGAHGYNPEGVRIGQEKNRNNRAVKVWDKREFKDLDGNVELGIRNIKVALRRLRKFARTGAPDELDLDTTIRETANHGYLDVHMRPERRNAVKLLVFFDIGGSMDAHIEQVEELFSAAKSEFKHMEYFYFHNCLYEGVWKQNKRRFTDRTPTWDVLHKYPHDYKVVFVGDASMSPYEIMVPGGSVEHVNEEPGSVWLDRIIRTYPHTVWLNPVQQKHWDYSESTTIIKRIFANRMYPITIEGLEAAMKELTH

SEQ ID NO: 15286 - protein, 81 aa, BradyrhizobiumColbertium
MGIVAALIIGAIAGWLAGKIVHGAGFGLVGNIVVGIIGALVASWVLPQLHIQLATGTIGAIVDATIGAVIVLVILSLIKRV

SEQ ID NO: 15287 - protein, 302 aa, BradyrhizobiumColbertium
MRGRSLVVTKALPWDDDQQGRAMKFTGTKDYVATDDLKVAVNASIVLERPLLVKGEPGTGKTVLAEEVAKALNAPLLTWHIKSTTKAQQGLYEYDAVSRLRDSQLGDARVSDIKNYIKRGKLWEAFTAEQRPVLLIDEIDKADIEFPNDLLLELDRMEFHVYETGETIKAKQRPIMMITSNNEKELPDAFLRRCFFHYIKFPDADTMGRIVDVHFPGIKKRLVEEALRIFFEVREVPGLKKKPSTSELLDWLKLLLNEDMSAEQLRERDPRKLIPPLHGALLKNEQDVHLFERLAFLSRREV

SEQ ID NO: 15288 - protein, 548 aa, BradyrhizobiumColbertium
MDRFDYVIVGAGSAGCVLTSRLSEDPNTSVCVLEAGPRDWHPYIHLPAGFIKTFHMKSINWAYQQEPGPWTGGRSIYAPRGKTLGGSSSINGHIYNRGQRMDFDTWAQMGNRGWGYADVLPYFRRLEKRIGEGEDTYRGREGGLTVTTMDWRDPLCEAFMEGAVSLGIPRNPDYNGKTQEGVSYCQRTINNGLRVSAATAFLKPAMKRPNVHVHTHAHATEIIFEGKRAVGVRYMKGGRGGHPVEVRANKEVILSGGSYNSPQLLQLSGIGSPDLLQQHGIAVRHSLPVGEGLQDHYAPRTVARVKNIKTINELRRGVSLWIEAMKWATARRGLLSLSPTMVYCFWHSGESAESSDLQLTFTPASYKEGVQGQLEDEPGMTVASWQQRPESRGYVRIRSSDPFAPPIIQTNYLDAELDRRVVVGGMKLARRLLKSAPLSPYYAYEDFPGPNVNTDDEFLQAATQRGTTTFHPGCTCRMGPADSTWAVVDDQLRVHGLEGLRVIDASVMPRMISANLNASTMMIADRASDLIRGKQPMEAARIPDAAMA

SEQ ID NO: 15289 - protein, 197 aa, BradyrhizobiumColbertium
MPWPDPVTLRGQHARLEPLTHDHRQGLIEAVKDGELSKLWYTAVPTPEGMAKEIDRRLALQAAGSMLPFTVFDSTGRIVGMTTYMNIDAANRRVEIGSTWYGKSAQRGPLNTQCKLLLLRHAFETLNCIAVEFRTHFFNHQSRRAIERLGAKQDGILRSHQVAPNGTLRDTVVYSITAAEWPTVQAHLEFQLNDKPR

SEQ ID NO: 15290 - protein, 308 aa, BradyrhizobiumColbertium
MSNIRVLATDLEFPEGPVVMPDGSVVLVEIRGQRLTRVYPDGRKEIVAKIPGGPNGAALGPDGKMYICNNGGFSWIPTRNMIMPGPQPDDYLGGSIQRVDLQTGKVETVVTKCGAHDLRGPNDLVFDKQGGLWFSDLGKRRAREMDVGGMYYLKPGMSELVEIVHGILPANGIGLSPDENTVYIAETPTGRLWAYELSAPGTLKPRDVIYRGERGKPICGLGGYQMFDSLAVEAGGNVCVATLVSGCISVIAPDGTLVEQVPTGDRVTTNIAFGGPELKTAYITLSGKGELIAMDWPRGGLPLNFLNK

SEQ ID NO: 15291 - protein, 303 aa, BradyrhizobiumColbertium
MPIKQIGTDGRIIAALRTRTITVTPAQRALWYIESHLAEPMTLDQIAAISGVSRFHIVRAFAAATGFPVMRYVRARRLTEAARSLARGAPDILSLALEADYGSHEAFTRAFRDQFGTTPEAVRATTCVSHLRLQEPILMDSTMLDHLAPPRFETAKTFLVAGPVARISCDNGAMIPGLWHRFQQEVADIPASVGQGKNQAAYGVCCNGDDAGNFDYIAGVEVADFSDLPRRYGRIRIPEQRYAVFTHEDHVASIRRTANTIWNQWLPASGLKAADAPNFERYDETFDPSTGHGGFEIWLPVRE

SEQ ID NO: 15292 - protein, 367 aa, BradyrhizobiumColbertium
MEITDVRAHHIRIPYDAGVASFRQGASAISALDMVLVEVTTDSGLTGWGDAFAYVCPRTTRSAVEEMIAPQAHGLKVPDAAGIPAAMEQIQRNLHLFGRYGITMFAISGLDIALWDLAAKIEGVPLHRLLGEIRRTAIPAYASLLRIGSPDNIASECRKALALGYGAIKLHETTAPAVFAAREAIGPEIPLMVDMNCPLTGEQAIAFAKTCRDAQPMFLEEPVWPPEDFATLAEVRDQGGLGIAAGENACTEYQFRQMMEAGAVSHAQPSVIKVGGISEFLKVAALADRRGIKIVPHSPYFGPGLLATLHLLATRDDGLVEIFYLKREACLWGGRADSDATGHVAVPTGPGLGYEPDRGVMECYRVT

SEQ ID NO: 15293 - protein, 117 aa, BradyrhizobiumColbertium
MLLRGPGICFAMLLLVTQVALPVHAQDVPGIEICTVEKTMERRTSCLQSNVDFLQKTITKLNLDHQQKLDAAGRQIDALKTSLAGMQKTLADLQAAQAKFADDLKKKQDAAPAKDGK

SEQ ID NO: 15294 - protein, 74 aa, BradyrhizobiumColbertium
MATRDRRLAEFDGAGEPPPGLPLEVLCEDHSGTYQLPFACRYVEGRWQNHEAGIAVEATVIGWRLPRVKQRGAA

SEQ ID NO: 15295 - protein, 218 aa, BradyrhizobiumColbertium
MAKATLTISSKNYSSWSLRGWLLTKFSGLDFEEIVTAPDDASARAEILLLSSSILVPCLRHEGAVVWDTLAIAEYLNEVMPDAGLLPADRIQRSHCRSISGEIHSGFTTLRASLPVNLKGHFPGFKIWSRAQADIDRVWFIWRDCLEKSGGPFLFGAQRTMADAMYAPVVTRFVTYDVKLAPPLQAYADTIMAMPEMQEWVAAAREEPAEIEELEVEY

SEQ ID NO: 15296 - protein, 407 aa, BradyrhizobiumColbertium
MMSMYYQAFQNHMDLTAPWRAGASSALKFLNLVPQGASDQVIGRLSAALELISRSTLTYDRPAYGIDSVMVGNREAAVTEEIAYATPFGSLLHFRKEGVGEQPRMLLVAPMSGHFATLLRGTVKTLLQDHDVYITDWHNPRDIPRSEGRFGLDDYTEHLIDFLGQLGPRPHMVAICQPSVSALAAAAIMCEDNHPARPATLTLMAGPIDTRIQPTRVNEFAKSRPIEWFERNLINYVPVQCRGALRKVYPGFVQLTAFVSMNLERHIKQHLDLANHIAKGETEKAATIKTFYDEYFAVMDLPAEFYIETVRDVFQEHLLPQGKLMHRGRPVNTKAVNRMGLMTVEGEKDDICSIGQTLAAQDLCTGVRAYRRVHHMQAGVGHYGVFSGKRWNNEIYPLLRDFVHVNS

SEQ ID NO: 15297 - protein, 341 aa, BradyrhizobiumColbertium
MSAAVLEMSARAPAAERLAAFARVTTDDVDEAAEQIGRIFCPHDLKPERARAAGFSARHNCAAFDGFSINYVAYGGSVSIDPGCLERFFLVQIPLAGSARIRSGVGEFDVVPDRAASLLSPTIPTRMMWSDCAQAILLLDRRMVEQRAAALSGRTAGTVEFDPVIDLDAPSGRGLQASLAGLMNLAERFGPSGRLSPVAMADWRELLLDHLLNGQRHGLSDAIRTFSGQAERLPRALRAARDHLADHAGEPLDLGELACVSGIGIRALQLGFRRHFGVSISEMLLDMRLASLHARLAQAAPDASITDIAFDLGFTHLGRMAGAYREKFGETPSATLRRRMS

SEQ ID NO: 15298 - protein, 149 aa, BradyrhizobiumColbertium
MTALEKGITANGTGYGGKSWNILGQVYFPKAVTDSTFAFETNSDPGQFVPVHIHPTQDEFILVQEGTLDLKLDGQWVKAHAGDLVRMPRGIPHGYFNKSDKPCRALFWVSPMQKLEALFNQLHNLTDPAEVVRISALHEVDFLPPEAND

SEQ ID NO: 15299 - protein, 496 aa, BradyrhizobiumColbertium
MVSLKHVCVIGAGVSGLAAAKAFSTHGHRVIIVERSSDLGGVWEPARSYPDVQTQSPKELYRYTDRAMPDAYPEWPTGPQVHAYLADYAKSFGLDRMLRLDTQVAGMARRADGRPGWTLALRNRDGATTNEDFDFVAVCTGQFNEPRELHCPGEDAFLAQGGQILHSSKYSDPALAKGRRVVVLGGSKSATDIAVNAVKSGAREVTIVMREPVWRIPYFIGGLVNFKRILYIRAQEEMFPGWGISATSRLAHRIAAPLVWANWRGLESLLKAQLKLKQCKMVPNERIEDGVNCSVPIATPGFYPMVADGRIKAVFGTFDRYDGDSIVMSGGERVGADIAVLAIGYKLGVPFLPEAYRQKLVDGDGQYRLYRLIASPDLPDMGFVGFNSSFCTVLCADLAANWLVRYADGQLANQPTAQAMRDNIEMMLHFRRVERPAAGVYGGLCVAPYHYRHFDELMADIGTKTQKRKGLAGRFLPPDADVYAKFLASAPDYRAA

SEQ ID NO: 15300 - protein, 355 aa, BradyrhizobiumColbertium
MGSRRLAALAAIAFFISAPANGQQPALTARQSEALTAYDRALGDFKAILSERRRQIEAKEPLPNLPGQALYLARVAVISTYKDLTDVMPSRIGRPNKFEIPPAYFDADIEPLVDEYGKLFDIMEAPPPGAQNSPTPVKDVVDLAVAIARAKGLAPEHAETAGRISLGLFFAETNGKQNVRNARSNTYMGSFQTGPSEDRNGRRKWEKIKSDVAALDPALSARDDKEEARARGTDHRFNHWTNVRNGLMNAHADLFREIPGIVKTLPDPIDQMKLFQLIQIVPTPTRSALRSGDLLNYRVSSPTVMKYLRNNSIFAFGQADRARSSASYREIFAAMWLFNRKFERAMTSYAEIRAR

SEQ ID NO: 15301 - protein, 334 aa, BradyrhizobiumColbertium
MRFLILGGSQFLGRAIAAHACAAGHDVTCAARGLAGPIAAGARFVRIDRDAADGLAPLAAETFDAVVDVSRRPGQVRRAVATLKRPDVHWTFVSTISVYADNRIPGQRADTAPLREPVGAEIEHSTDAIYGAAKVACEQAVGGDAFICRAGLIAGPEDPTGRFAYWPARLAQGGEVLAPGSPEDAVQFIDVRDLAQWIVDAAEIHLTGIYDGIGPTRTRGEFLSECASALNTSCTFTWIDRAFLEAHDVRRWAGPRSLPMWLPLPDYAGFLTRDTSPARAAGLTSRPVAATARDTLHWLLAGGGPVVGLTADEEKDVLAAWHAHQPGWGRNVTS

SEQ ID NO: 15302 - protein, 369 aa, BradyrhizobiumColbertium
MIALAGCEDKNTFVAPPPPKVDVATPVQRPVTRYIESTGNTAPVKSVDLVARVQGFLQSIDYQDGTFVKQGTQLFTIEPETYKLKLEQAQAAEAGAQASLRQAEADYKRQAELVQRQAVSQATLDTSTSNRDNAQANLQQAQANTKLAEVNYGYTKVTAPFDGIVSAHMVSIGELVGVSSPTQLATIVAMDPIYVNFTVNEQDVLRIRAEAARRGMTPANLKEFPIQIGLQTDTGYPYQGHLDYVSPTLNQSTGTLAVRGLVPNQKRVLLPGYFVRVRVPFEQEKSALLVPDTALGSDQGGRYLLVVNGDNIVEQRKVQIGPVDNGLRVIENGLKPDDRVVVAGLLRVIPGQKIDPQVTKIEQPQASAK

SEQ ID NO: 15303 - protein, 1049 aa, BradyrhizobiumColbertium
MISKFFIERPVLSNVIALLMILIGGVALFNLAIAQYPDVVPPTVQVTTRYPGASAKTVIDTVALPIEQQVNGVEDMLYMQSYSAADGTYTLTVTFKIGTDLNFAQVLVQNRVSSALSQLPQAVQNQGVTVQKRSTSILLFVTLTSPDSRYDSLYLSNYATINIRDELSRLPGVGNVTVFGAGQYSMRVWLDPNKLQVRGLVPQDVIQAIQQQSQQVSAGQVGAPPTPPGQAFQYTLNVNGRLDDTSQFENIIVKSGSSGDVTRVRDVGWVELGAQTYNQIFSLNKQPAVGIGVFQSPGANALQVENAVEKKMAELAKRFPEGIKYDTPFDTTKFVEASVHEVYTTLIEAGLLVLVVILIFLQDWRAMLVPATTVPVTIIGAFAAMAALGFTINMSTLFAIVLAIGIVVDDAIVVVEGAAHNIEQGMNGHDAAIRAMDQLFAPIVGITLVLISVFLPASFLAGLTGRIYSQFALVIAATALLSAINAATLKPTQCALWLRPAVPPEQRNFFYRGFNAIYNRVERAYTRLITFLVKHATISVAFALLIIGASGYGLSRVPTGFLPIEDQGYLIAAVQLPDGAALERTQAVLDRASELIKDTPGVQQVITIAGISALDNSASLANAGVAYIILKDWDARKGPGEDLRSLVFGLNDKLAAIMEARTIVLPPPPIQGIGNAAGFSMQVELRDGNSDFAKLQAITGAMVSNAQSQSALQRVQSSFRSSVPQFNVEIDRVKTQTLHVTTDQVFSALSTYLGSSYVNQFNKFGRVFQVYTQADPAFRVTERDIANMMVRNSNGDMIPIGTVAKITPATGPSLISLYNLYPSSTVIGLPAQGYSSGQSLKLMEEIADKTLPPGTGYEWTAMSYQEKAVSNQIYWVFGLAMLLVYLVLAGQYESWYAPISVILAVPLSLLGPMLVLSALKIDNNLYCQIGLILLIALSAKNAILIVEVGLELHGRDGRPILESAIEAARARFRPILMTSFAFILGVVPLVLATGAGASARKSIGITVFSGMLASTCLAVLFVPAFFVVVQRFENWRASKKRKVQAVPAK

SEQ ID NO: 15304 - protein, 754 aa, BradyrhizobiumColbertium
MQSLLRPIVIVPAALVFTTMAAFAETGKADGPSEFLLVAQIVLLIAVGRGLGEIMMRIGQPSVIGELLAGIILGPSLFGWIWPEAQHAIFPKSPEQKAMIDGIAQFGILLLLLLTGMETDLKLVRKVGRAAIAISVAGIIVPFACGFALGEFLPDALLPDPQQRLVASLFMGTALSISSVKIVAVVVREMNFMRRNVGQIIVSTAVIDDTIGWIIIAIIFSLASHGTLDIASVAKAVLGTLAFLAVSFTIGRRLVFQLIRWANDNLVSAAPVITVILLLMSVMAMITHLIGVHTVLGAFVAGILVGESPILTRQIDERLRGLISSFFMPVFFGLAGLSADLSVLRDPNLLMLTGLLVVIASVGKFGGAFVGGTLGGLNARESLALASGMNARGSTEVIIATIGLSIGVLSQNLFTMIVTMAIVTTMAMPPMLRAALARLPMSKEEKERLEREEFEKRGFVANLERPLLAVDESVNASFAAHIAGLIAGKRNLPLTVLHIGQHAKEQEKGRDEEESHEAVVKKAAEVVSARGDGEAGNVDVVSRARQAGLGETIADEARKGFDLLVVGIDTVVTTKDRFDRRIDDIAAKFEGPLAIVAAKGKHLKQPMPDALNILVPVSGSSVSKRGAEIAVALAQAGSGSLRVIYVATTRDKGAQRGVSGGLSQETGILKDASDLAARYDVDITTTLRVNRAPEAAILREIDTTDVDLVVMGVDRIQADHLSLGGVADAVLRQSKVSVLLVSSGEARRTPAEKG

SEQ ID NO: 15305 - protein, 132 aa, BradyrhizobiumColbertium
MHSRDALKALEISAPPKKLAPSGKTLAGWHHRWRGWAAIFQAPTPRPPVIERSEAIQSLSAERFWIAPSLRSSRRRWRTGAASRRHAGAPTGANAEVLGQQSVRTNGPGLVAARRPGMTRGGSIALTPSAAS

SEQ ID NO: 15306 - protein, 390 aa, BradyrhizobiumColbertium
MNSPGRVISFVNAGHFIDHYAMLIFAAAVIIMGPALGMAYSELLPYATPGFVAFGAGSLLTGWLGDRWSRRHMMLIFFVGIGASMVAVGFVQTPVQLGAALLAIGIFASIYHPVGTAMIVSYADRLGREMGINGVWGNLGVASSALVTGVIGQYLGWRFAFIVPGAVTILTGIAFAMSVVHEDRKGSKQAAAQARVAKRDMWRVILALLIVVIAISTTFNAVTVALPKLFAERLADLTKSPALLGVIAACVYVFGAMTQYTIGRLLDRYSLKTVALPLSFMLAPFLYLAASLNNLPLILVSIGIVMGAFGQVTVNDAMVGKYTTEEWRSRAYAVRYFVGFTAAGASVGLVAWLYEQGGFVTMLHAFAALCLLAIAAALILPREIRTPQTA

SEQ ID NO: 15307 - protein, 266 aa, BradyrhizobiumColbertium
MTVLETPILREVRGNHRSTAGVHLVARDYPKGMRIKPHLHREAQLIYAAKGTMQVTTPGGRWLVPPDRAVWVPAGLEHAIDLLADIEMRTLYFDLSWLKRERRYDGLTREFVVRVSPLLNQAILALFDTRNTEERTELLVRLVMLELHQAEDSATFVPLPHEPRCRRAAMIVLDDPTGLHDIDTLAREVGTSARTLSRLFSSETQLSFKSWCQRARIAAAIQRLSTDATVSVKQLATSLGYASVPAFSAAFRQVTGRTPTEFAGKG

SEQ ID NO: 15308 - protein, 450 aa, BradyrhizobiumColbertium
MANAFFSDLLATISERGRTLLRRGDSADTRRDADGLLELCDALLSGRGEASGTAMAREVLDIYRELDAAGRRAFFEGLVRDFGPDRERLSKAIETWRAKPSDEDASALHFASEPRRQELIRRLNRAPGGTGDLVNMRADLLGMMNGHTDLAALDRDVSHLLSSWFNRGFLVLRRIDWSTPANILEKIIRYEAVHEISDWDDLRRRIDPVDRRCYAFFHPAMVDEPLIFVEVALTETIPGAIQPLLAVDRQHLPIERARTAVFYSISNTQRGLGGISFGSFLIKQVVEELRRELPKLDTFVTLSPVPGFMAWIKQDKDLPLSDEDREVLKRLEDPRWFESPETTALLRSVIEPLAAHYFLKARTSKGKLIDSVARFHLGNGARLERINWLGDLSPKGVRESAGVMVNYLYRLDDIEKNHEAYANDGEVVASSAVKKLLKSEGRRLLDIRLS

SEQ ID NO: 15309 - protein, 389 aa, BradyrhizobiumColbertium
MSVRIVDVREITKPISSPIRNAYIDFSKMTTSLVAVVTDVVRDGRRVVGYGFNSNGRYGQGGLIRERFASRILEADPKSLLDEAGGNLDPDKVWAAMMTNEKPGGHGERSVAVGTIDMAVWDAVAKIAGKPLFRLLAERHGVTADPRVFVYAAGGYYYPGKGLSMLRGEMRGYLDRGYNVVKMKIGGAPIEEDRKRIEAVLEEIGKDAQLAVDANGRFDLETAIAYAKMLRDYPLFWYEEAGDPLDYALQAALAEFYPRPMATGENLFSHQDARNLIRYGGMRPDRDWLQFDCALSYGLCEYLRTLEVLKTHGWSPSRCIPHGGHQMSLNIAAGLGLGGNESYPDLFQPYGGFPDGVRVENGHITMPDLPGIGFEGKSDLYKEMKALAE

SEQ ID NO: 15310 - protein, 80 aa, BradyrhizobiumColbertium
MSDEFPDRLSVDPNSPYYNADILARDVGIRFKGIEKTNVEEYCISEGWVRVTAGNAKDRHGNPLTIKVHGPVEPYFRDKK

SEQ ID NO: 15311 - protein, 158 aa, BradyrhizobiumColbertium
MTAIYDFKANSLAGEEIALRRFEGQVLLIVNTASKCGFTPQYRGLEDLHRDLSPRGFSVLGFPCNQFGAQEPGPASEIQEFCSTHYEVTFPLFEKIDVNGPKAHPLYEYLKRQQSGLLGASIKWNFTKFLVDRAGKVVARYAPTARPEGLRQQIETLL

SEQ ID NO: 15312 - protein, 466 aa, BradyrhizobiumColbertium
MQDLWRLSAADLAALVKSKKVSAREAAQAGLARLDAVNPKLNAVIDHRPEDVLKQADGVDAAIARGEDPGVLAGVPVTIKANVDQEGFATTNGLKLQRDVIAREDNPVVANFRKAGAILLGRTNCPAFSYRWFTTNLIHGDTKNPRDASLTPGGSSGGAGSAVAAGIGHIAHGTDIAGSIRYPAYACGVHGLRPTLGRIPAFNPALPERPIGPQIMAVSGPLARTVNDLRISLDAMSARDIRDPWFVPVPLQGPARDKRAALCLNPGGLATTPEVKAAVSDAGKRLERAGWTVDVIEDTPPMREAVEWQIKLWLGDGYEAQLEAAEREGDPGALACLRGNRSRVTPMDQANYAKALTRRATLTREWMLFFEKYAVLLTPVSGELPFPDHLDRKDDESFKRVWEAQLPQIAIPFMGLPGLVVSTGLVGKAPVGVHIVSGRYREDLCLLAGEAIEAGGVPPSPIDPVD

SEQ ID NO: 15313 - protein, 85 aa, BradyrhizobiumColbertium
MPRYFFNTRIGDELIVDPEGEDLRNPDRAWEVARQMILEVVKSEGTQRALLEAVIEVTDAEGEIVLEFPFTEALLDLPDQSATRH

SEQ ID NO: 15314 - protein, 309 aa, BradyrhizobiumColbertium
MLRVVVLGAAAGGGVPQWNCGCDGCRAARSGGHELHRTQASVAFSGDGEHWFLINASPDLRQQLNATPQLHPRAGALRHTPIAGVILTNSEVDAVAGLLSMRESSPFTIYAHEKALAILASNSIFNVLNEKHVRRQPISIREPFEPRLTDGARSGLEVMAFAVPGKSAWYLEGKTHPGGENGDGDTLGLKITDKATGKCFYFIAACAEVTDALKAEIDGAALVFFDGTVWRDDEMIRAGLGHKTGKSMGHVAMSGEGGAIARLADLAIDRKIFLHINNSNPALLPASPERKATEEAGWQIPADGTEIVL

SEQ ID NO: 15315 - protein, 259 aa, BradyrhizobiumColbertium
MIAASLTGMTALSIGKDIRLGSAEELEAALRHIGATRYHSLHPFHKLLHGGKLNKGQVQAWALNRYYYQSTIPIKDAVVISRFRDRAKRLEWRHRIEDHDGDVGSEGGIERWIKLTEGLGLDTAYVESTEGILPATRFAVEAYVHYCREKSPLEAIASSLTELFAPNLHEERIAGMLEHYDFVNPDIMSYFKRRLTQAPRDANFALDYVKTHATTPEQRALVCNALIFKTNVLWVQLDALQHAYVEGHIPPGAFVPKAS

SEQ ID NO: 15316 - protein, 103 aa, BradyrhizobiumColbertium
MAGPRHISVSEASRPVLPRHAKLKYDETRKVWVILAPERVLAPDEIAVEVLQLCNGERNVGDVADQLAAKYAAPREAILADVIAMLQDLADKGFLTEIREKTS

SEQ ID NO: 15317 - protein, 393 aa, BradyrhizobiumColbertium
MSDVTIPPSDSLAVLEKQRSTAESFGIPLAVLLEITHRCPLQCPYCSNPVELDRSAKELTTEEWKKVLSELAEIGVLQVHFSGGEPTARKDLVELVKHASDVGLYTNLITSAVLLTREKLSDLADAGLCHVQISFQGIEEGLADRVGGYKGGHRKKLEVARWTRELDLPLTVNAVMHRQNLHQLPDMIQMSLDLDADRLEVANVQYYGWALKNRAALMPTVAQLDECTEIVEEARERLKGRLTIDYVVPDYYALRPKKCMGGWGRQFFNISPAGKVLPCHAAESITGLEFESVRSNHSIAWIWQNSEAFNRYRGTGWMKEPCKSCEFREIDFGGCRCQAFALTGDAANTDPACALSPLHETIFKQAEAEAEGETSRFIYRNFAGGTLESENGT

SEQ ID NO: 15318 - protein, 328 aa, BradyrhizobiumColbertium
MGPDADAATSVKRADPFAPLTSDMLDVGDGHELHVESVGRADGIPAVYLHGGPGSGCQPDHRRLFDPDRFCAVLFDQRGCGRSRPKGSREHNTTAHLIADMEKIREKFDFDRWMVVGGSWGATLALAYAEAHPERVSGIALRATFLGTRAEVETAFTSRLAQFYPALHEDFLGVLPGEERDRPVGAYWRRILDADPAVHGPAARAWHDTERTLSEHKPARTRLDLASLSVWRTLPATPFMEAHYFVNDSFMTEDQLLRNAGRLAGIPGIIVQGRYDLLCPPETSQALTKVWPGSELRLVEAAGHSLYDAGVRDAVMKSIADLASKIGR

SEQ ID NO: 15319 - protein, 225 aa, BradyrhizobiumColbertium
MPLAGKGMLLTSMNIDVSDEADFNRWYDREHLEERVAIDGFLEARRYVAHAANPKYLSLYSTATLDVLDSPAYRARLANPTDWSRQTMARFRDMLRVVARITISKGTGRGAVLGLVRLRPTPDNAGAWRDALQDKLRPEAHDGIISMHLLESEPELSGATAGIPATRNEGARDWFVLIDGTHVGAVSAVIAERFTGPAAAPFPPPVSVGTYCLMWDLAKSDIAHG

SEQ ID NO: 15320 - protein, 521 aa, BradyrhizobiumColbertium
MAICRLKRVAADFKDDIRQRLPRPAPKNGKRVALVGGGPASLTVARDLAPLGYHCTVFDADPEAGGMMRTQIPKFRLPNSVIDEETGYILGLGVDFKGGHRIESMKALLAEKYDAIFVGSGAPRGRELDIPGRKEAASNIHIGIEWLASVSFGHTDKIGKRVIVLGGGNTAMDCCRTARRLGGEEVKVIVRSGFEEMKASPWEKEDAIHEDIPILNFMVPVAFVHEGGKLTGVTFQKVKAEYDAKGRRNLVPSGEPDQTIACDDVLVAVGQENAFPWIEQDCGIEFDKWHMPKVDPKTFASTNPRVFFGGDAAFGPKNIIWAVAHGHDAALSIHKMLSGEAIDERPLPDVQISSQKMGIHEWSYDNDISVDKRYKVPHRDKVVALKDIRAEVELGYDVKLALGEAHRCLNCDVQTVFSTSLCIECDACADICPMDCITFTANGEESDLRQRLKAPSLHPDQDLYVSSDLKTGRVMVKDEDVCLHCGLCAERCPTGAWDMQKYFIEMTHAGSTCPTKSRSAA

SEQ ID NO: 15321 - protein, 615 aa, BradyrhizobiumColbertium
MSDKKPISSVNDFVVRFANVNGSGSASANEMFARAILRHGVPVSPRNIFPSNIQGLPTWYEVRVTEDGHLGARGGVDMMVAMNPQTWDKDVAGIEPGGYLFYDSPKPMPSTKFRDDINVIGVPLTAITNSTYTDPRQRQLFKNIIYLGALSALLDMDPKLIEQLIGEQYKGKEKLLSSNVHALHLGRDWALSNLKCPIGLRVKKSDKVGDRIFIEGNSAAALGAVYGGATVCAWYPITPSSSVAEAFTAHCKKYRHDPETGKAKYAIVQGEDELASIGIVIGASWNGARAFTATSGPGISLMTEFIGLSYFAEIPAVIMNIQRAGPSTGMPTRTQQCDIIACAYASHGDTKHVLLFPEDPAEAFEFAAAAFDLAERLQTTIFLMLDLDIGMNHRLCRPLKWDDSKQYDRGKVMTAEMLDEGRDFGRYLDVDGDGIPYRTYPGTHPTKGSYFTRGTSRDRYARYSEEGSVYADNMQRLVRKFETAQDLVPRPLQANAERPTKYGVIYFGSTSPAMDEAIGLLEARGHQLDRLRIRAFPFHSSVASFLAEHDFVYVVEQNRDSQLRQLIVNENGIDPVRLVPIVHYDGTPITARFIAKAIGDHQDHLKVTPLRKAVS

SEQ ID NO: 15322 - protein, 57 aa, BradyrhizobiumColbertium
MTNILLSLSSCPGIAVRRTASLPLAYAPASTRFVVAAKTWTAGSRPAMKQRTFQVLA

SEQ ID NO: 15323 - protein, 351 aa, BradyrhizobiumColbertium
MTYIAKPKFHHPGLKKNALGYTHRDYEGKISTLCAGCGHDSITASIIEACYELSIEPHRVAKISGIGCSSKTPDYFLGNSHGFNSVHGRMPSVLTGANLANRDLIYLGVSGDGDSASIGFGQFAHSIRRGVNMTYIVENNGVYGLTKGQFSATADRGSKSKKGVTNTDNAIDLVAIALQLGATFVARSFSGDKTQLVPLIAAAIRHKGASFIDVISPCIAFNNHAGSTKSFDYVREHNDAVNRLDVLVGRDPIAVDYAPGTVQVVEQHDGSKIALRKIDADYDPHDRLGAMTFLQKHAAKGQIVTGLLYVDPDAEDMHEHLNTVETPLNSLEADSLCPGSAVLDKINASLR

SEQ ID NO: 15324 - protein, 149 aa, BradyrhizobiumColbertium
MKVTSCIALAAAIALLPGTACSQGKSAPKDAKLYFITPYDGQKVRGGFWVRFGLRNMGVTHAGDDYHNAGHHHLLIDVKDPIDVKEPIPQDKSHLHFGAGQTETFLELSPGTHTLQLVLGDAKHYPFEPPVVSDKIKIRVRPAVSARSR

SEQ ID NO: 15325 - protein, 508 aa, BradyrhizobiumColbertium
MGEIRNFRSENQDEPPPHSGVPRRLAAIIVGDIASYSRLMQADEEGTHIRVKRIERDLIQPSIIEHHGSLVKTTGDGFIAIFDSPVEAVRCSIVIQQNLVGRNASVPKHSRLEYRIGVNLGDVIVEPDDIYGDGVNIATRIEGIAEPGQVYISGAIYEQIKHKIVCGYESLGDRKVKNITDPVRVYRVLPDADAVGKTRSRRETALIFLLAITMLTMATGVLWYLLAQPSRMGEQAAAPPTAPVASPIAQASPSEAATQMSQASPSLASSPPPPVPTPSPSATPLREPEMIAIRGGSFAMGSNDDPTERPVHQVTIKPFSIGKYPVTVQEWNECAAAKACGFTASGKDDAPVSNVSWIDAKQYVDWLAQATKKPYRLPSEAEWEYAARGGTQTKYWWGDKLQPGMAGCKDCGELAAEQPAKVGSFKPNPFGLYDMGGGIDQWVADCWHRTYQGAPSDGSAWTSADCSAHVLRSGSWKNDSGYVRPSNRGGYDAGVRYPTHGFRIALSP

SEQ ID NO: 15326 - protein, 37 aa, BradyrhizobiumColbertium
MKAITSTSRDNVAATVGVGSKETRRDILLNLLDRGVD

SEQ ID NO: 15327 - protein, 205 aa, BradyrhizobiumColbertium
MKLSLVAVLAFAALTGVAHADETEIRETTKAEAETFNVRMYAGPPGNKAYACFVRRYDADHLARHPKQRVAAMKLLISAEVDAEDKELHSSFRLGFRYRHRSGDFDSSGSCNHVVFTASGGEVRLGCGVDCDGGGIGVALSKDDKSAIVRLERVRVWQNNKPDDDAEHSLTAGADDKIFRLDRTDNSECASLVTDRKELAALRHK

SEQ ID NO: 15328 - protein, 148 aa, BradyrhizobiumColbertium
MNRRNILWSAVSALGAAFGASSAKAAAQAAPSKLKVAYHLSDAEKVNFVLGNIQNHIDGVGGPEHVTIALVIHGPALKAFHAMQANPDVSKRVGEFSKGGIELAACGNTMKAQNVTLADLLPGFVNAESGGVVRLAELQSQGYLYLRP

SEQ ID NO: 15329 - protein, 107 aa, BradyrhizobiumColbertium
MAADPDLLFRTLADPTRRAIFERLCREGEQTVGALTMRSGVSQPAVSKHLGALKQAGLVRDRHEGRQTHYSARPGALNPLIDWTSQMAGFWQKRLDALDDLLKRMDQ

SEQ ID NO: 15330 - protein, 141 aa, BradyrhizobiumColbertium
MNEPETRSVIVEREFAAPVERLWRALTQPHLIEEWLMKNDFKPVVGHRFNLRGEWGGVLDCEVLTIEPQKTLAYTWNFSHEDAAFDLKSVVTFTLTPTSAGTHLRVEQSGFRPTQKQAFGGAHAGWKQFFARLDDVLARAG

SEQ ID NO: 15331 - protein, 63 aa, BradyrhizobiumColbertium
MWIRQIHRWLSMAFTIAVIANIVAMTMQVQAAWIGFLALVPLIPLLATGLYLFALPYLRRSNA

SEQ ID NO: 15332 - protein, 144 aa, BradyrhizobiumColbertium
MAVTLKKARTKDTKQASPSKLIDGRIKELGDWRGEMLGRVRGLIKQADPDIIEEWKWRGVPVWEHDGIICTGETYKDVVKLTFAKGAALEDPAGLFNASLDGNVRRAIDIREGGKINEEALKALIRAAVDLNGSKKKPGKKRAV

SEQ ID NO: 15333 - protein, 512 aa, BradyrhizobiumColbertium
MTERLFEGADWDFHTLQRITDACEEVALKDLGLDVYPNQIEVITAEQMLDAYSSVGMPLFYKHWSFGKHFAFHEASYRKGLMGLAYEIVINSSPCISYLMEENTATMQTLVIAHAAFGHNHFFKNNYLFKQWTDADGILDYLDFAKNYVMQCEERYGRIEVERTLDAAHALMSHGIDRYPGKKKLDLRAEEKRAGRRRQHEEEVFNDLWRTVPKGAAKSRSTLSIERRRKLLGLPQENLLYFLEKSAPRLAPWQRELLRIVRHIAQYFYPQSQTKVMNEGTATYVHYRIMTKLHEQGRITDGNFLEFLGSHTNVVFQPEFDDPRFSGFNPYALGFAVMQDIERIVTNPEDEDREWFPDIAGKNDVMGVLRDVWANYRDESFIGQFLSPKLMRHFRMFHLHDDPEERAGIRVDAIHDERGFRRVRRELARQHDVGYIDANIEVVDVDLSGDRRLILHHHVIKGAQLNETDAKRVLQHLADLWTYDVALIEVDANDKVLREYVVSPRPIPAAVA

SEQ ID NO: 15334 - protein, 427 aa, BradyrhizobiumColbertium
MPIHIIDRRLNPGGKSLENRQRFLRRAKSLVQGAVKKTSQERDIKDVLEGGEVTIPLDGMHEPRFRREGGTRDMVLPGNKKFIEGDYLQRSGQGSAKSSGPGEGDSEDAFRFVLSRDEFVDLFLDDLELPDLAKRKIAQTESEGIQRAGYTTSGSPANISVSRTVKLALARRIALKRPRKEEIEELEAAIAACEDEDERTELVAQLERLKAKSRRIPFIDPLDIRYRRFETVPRPVAQAVMFCLMDVSGSMSEHMKDLAKRFYMLLYVFLKRRYKHVEIVFIRHTDRAEEVDEQTFFYGPASGGTLVSSALQAMHEIVRERFNPSDWNIYAAQASDGDNSYSDGELTGMLLTDKILPVCQFFAYLEVGESGGSAFDLSDSSLWSLYERLRNSGAPLSMRKVSERSEIFPVFHDLFQRRETAQEKAAP

SEQ ID NO: 15335 - protein, 647 aa, BradyrhizobiumColbertium
MYNDSLFNAFARSFEARSQHDMSMAEYLESCRSDPMKYANAAERLLAAIGEPQTIDTAKDPRLGRIFLNRTIRTYPAFAGFYGMEETIERIVGFFRHAAQGLEERKQILYLLGPVGGGKSSLAERLKSLMEVHPIYVLKAGDELSPVFESPLSLFDPDQLGPMLEEKYGIPRRRLTGLMSPWCYKRLEAFGGDISQFRVAKIQPSRLRQVAIAKTEPGDENNQDISSLVGKVDIRKLETYAQNDPDAYSYSGGLNRANQGVLEFVEMFKAPIKMLHPLLTATQEGNYIGTENIGAIPFTGVILAHSNEAEWASFKANKNNEAFIDRICVIKVPYCLRVTEEQKIYEKLIQGSELAAAPCAPSTLETLARFSVMSRLRKHENSTLFAKMRVYDGESLKESDPKARSVQEYRDAAGVDEGMDGVSTRFAFKILAATFNHDPQEVAADAVHLMYALEQAIRREQLPEETEKRYLEFIKAELAPRYAEFIGNEIQKAYLESYSDYGQNLFDRYVDYADAWIEDQDFKDPDTGQLLDRELLNQELTKIEKPAGIANPKDFRNEVVKFSLRSRAQNGGKNPTWTSYEKIRDVIEKRIFSQVEDLLPVISFGSKKDGETEKKHGEFVARMVERGYTERQVRRLVEWYMRVKQAG

SEQ ID NO: 15336 - protein, 216 aa, BradyrhizobiumColbertium
MAVLGESMQAHKEGLAFAVANSPQAAGSAAGIDASRDLEIPRCVMQLRLLVAAGFAMTLLSASLAFDWWDGFGDYDKSVGYAGVVLFGLVTACLIWMLPAERGAVVVVTPYGIRDLRIGNEFLLWESIEEISAEECRGHKAIALTPTPALRHQLRAIPTLASYAQNGRIVIRPEGLATDFETLLRACRDCHASSSARTALQQDDERGGQGFAVQVS

SEQ ID NO: 15337 - protein, 51 aa, BradyrhizobiumColbertium
MLFQFFDGIHDASLSPSLRRGVSAPVLTRYPLTYMLPGGNQSRVWESYPPV

SEQ ID NO: 15338 - protein, 949 aa, BradyrhizobiumColbertium
MNPVKELEKHGQAVWLDFLARGFIAKGDLKRLIETDGVKGVTSNPSIFEKAIGSSDEYDAPIGKALKRGDRTVADLFEAVAVEDIQNAADVLRPVYDRLKGGDGYVSLEVSPYLAMDTAGTVTEARRLWKDVNRKNLMVKVPATPEGLPAIEQLIGEGISINITLLFSKAVYLRVAEAYIAGLEKYVAGGGDPSHVASVASFFVSRIDSVVDKQLDEKIARANDPSEKERLAALKGKIAIANAKLAYQDYKRLFSGPRWEKLAAKGARPQRMLWASTGTKNKDYSDVLYVEELIGPDTINTVPPATLDAFRDHGKPRDSLEENVEDARRVLEELERSGISLDTITEELVKDGVKLFADAADKLYGAVAHKRAVVLGPALDRQEISLGDGLGKALAESTEKWRASAKIRRLWQRDKSVWTGADEDKWLGWLDSPAKADIADYEDYAGRVKGQKFSDAVVLGMGGSSLGPEVLAETFGKKPGFPKLHVLDSTDPAQVRAMEAKIDIANTVFIVSSKSGGTTEPNAMKDYFHERVAQAVGPKVKTGHRFIAVTDPGSSLEKAAKQLHYARIFHGEPSIGGRYSVLSPFGLVPAATAGIDVKTFVKHALAMVRSCGPDVPPSENPGVQLGLAMGLAGLDGRDKVTILASKKMADFGAWAEQLIAESTGKEGKGLIPIDGEPLGDPSVYGNDRFFIDIRVEGEADAAHDSKLAAIEAAGHPVVRIVMKSIEHLGQEFFRFEMATAVAGSILGINPFDQPDVEAAKIKTRELTTAFEKTGALPEEQPVISTREADLYTDEANATALRAAGADGDLTSWLRAHLSRSGDGDYVALLGYIARDKATVEALQAMRLEVREKRHVATCAEFGPRFLHSTGQAYKGGPDSGVFLQITADDAQDLPVPGQKASFGIIKAAQARGDFDVLTERGRRALRVHLKGGLKKGLATLNAALNDALN

SEQ ID NO: 15339 - protein, 332 aa, BradyrhizobiumColbertium
MQLGMIGLGRMGGNIVRRLMRHGHSTVVYDKDANAVAGLAADGAVGSATLEEFVSKMERPRAAWVMLPAGHITETTIETIAGVMQADDVIIDGGNTFWQDDVRRGKALKARGIHYVDVGTSGGVWGLDRGYCMMIGGEKQVVDRLDPIFAALAPGAGDIPRTPGREGRDPRIEQGYIHAGPVGAGHFVKMIHNGIEYGLMQAYAEGFDILKNANIAALPPDHRYDFDLADIAEVWRRGSVIPSWLLDLTSTALADSPQLSEYSGFVEDSGEGRWTVNAAIDEAVPAEVLTAALYARFRSRKEHTFAEKILSAMRAGFGGHKEPKQPGAAKPK

SEQ ID NO: 15340 - protein, 503 aa, BradyrhizobiumColbertium
MTKDPQPKRKPDNCAFVIFGVTGDLTHRLVMPSLYNLAAENLLPEKFCVVGAARKSQSDDELRQSLMKGLREFATRPVDDDVAKQLLQCVTFVEADAKDPSSFDRLSRHLDTLECSEGTGGNRLFYLATPPAAFAPTARELGRTGLMKENGAWRRLVIEKPFGTDLASARALNAELLKIMEEHQIYRIDHYLGKETVQNILVLRFANGMFEPIWNRNHIDHVQITVEEKLGVGHRGGFYDATGALRDMVPNHLFQLMSLVAMEPPTRFDAHSVRSEKSDILTAIQRPSEEEALRNSVRAQYLAGRVGDEEIPDYRKTADIRPDSTTETYVALKLMIDNWRWAGVPFYLRTGKALAHKRTEVAIKFKQAPLSMFSGTAVDRLSQNFLTIGIAPTETIELQFNAKIPGPSVTIDGVEMKFRYGDYFRADPSTGYETLIYDCMIGDNILFQRADGVEAGWQAVQPFLDAWKNAGTNGIETYEAGSDGPKCADELLRRDGRSWRKYS

SEQ ID NO: 15341 - protein, 249 aa, BradyrhizobiumColbertium
MIAADQPKLIVETGAEALARAAAERLLARIAANPGRIAICLTGGSSPKRLYELLGSDGWRGRIPWQRAHWFIGDERFVPESDPLNNMAIARAAFLDGNAPPEHIHPIPTTGENPEAGAEAYARELQAFYGSDRLDRARPLFDLVLMGAGPDGHTASLFPGFPEIEETERWAVGVPKANVAPFVPRVSLTLPTLASCREMLFEIAGPDKRPILTRLFNGENLPALRARSNGETVWMVDRAALPEEIRGPR

SEQ ID NO: 15342 - protein, 167 aa, BradyrhizobiumColbertium
MIVMGVSGSGKSTIAEALGQRLGWRFEDGDSFHPASNVEKMRAGHPLTDEDRWPWLNAIADEIALVCRRGEHVIIACSALKHAYRDVLLRGRDDVRFVFLKGTKELIAERLAHRKGHFMPPGLLTSQFDTLEPPEASEHVITVSIDETVEAIVDGIVRQLKLGGVGR

SEQ ID NO: 15343 - protein, 270 aa, BradyrhizobiumColbertium
MTQISLVVSDVDGTLLTKDKTLTERAKNAVQRLHQAGIGFTITSSRPAIGMRFLIEPLALWLPVGPFNGSSIIDPEMRPVEQHLIPAAAAERALQILREFGADVWLFTTDKWLIDNPDGKYVAHERHTIRSDPTIVTDLSPYLAGACKIVGASADAPRLEACEKVMQEALGSAATAVRSQTYYLDITPPGFNKGTFVQAMAKRLGVSTDAVATIGDMQNDLAMFRVSGVSIAMGNAAENVKDEATHVTATNEQDGFAEAMEMILMRNGVG

SEQ ID NO: 15344 - protein, 599 aa, BradyrhizobiumColbertium
MSQRIEDYALIGDCETAALVGRNGSIDWLCWPAFDSDACFAAILGTHENGRWLIAPSEGATAISRRYIGNTLILETRFETIGGTVALIDFMPLRGKASDIVRLVRGVDGTVKMRMELVIRFGFGANIPWVRRIDHSLMAIAGQDLIVLRTPVETRGENLTTVAEFEVKAGETVPFVLAYGPSHLDPPAPIDPEIALQETERFWQDWCGHCTRDGDYQELVLRSLITLKALTFAPTGGIVAAPTTSLPEKLGGSRNWDYRFCWLRDATFTLLALMNSGYTEEALAWHNWLLRAAAGSPAKMQIMYGIWGQRRLLEWEAGWLGGYEGARPVRVGNAAHAQLQLDVYGELIDAFHQSRMAKLELDDETWALECAVLNHLAEVWDRPDHGIWERRGQPRHYVFSKVMTWVAFDRGIKSAETFGFKAPLLHWRTLRDAIHRDVCNRGFDAEENAFVESYGSKLLDASVLLLPEVGFLPPSDPRIRGTIAAVEKCLMRGGFVLRHDPRELPADQPPLEGAFLACSLWLADAYVLSGDLDKAQELFDRVVGIANDVGLLAEEYDSDARRQTGNFPQALTHIALINTAHNLSAARQGSEKPAVQRSK

SEQ ID NO: 15345 - protein, 653 aa, BradyrhizobiumColbertium
MDLLAQARLKGVQSEFIDALGKLRVTAPEALKSILDALPEKRVYRFVSGPVVVRALGHPRTELAAIGAPPLQWKLLGNGNVIATGETREPVIAWPAALPLGYHRLTLTDADGVTEEVPMIVAPERCFGGDFDRGWLLAVQLYSVRSDRNWGIGDFTDLADLVRLAKQLGADGVGLNPLHVLFDDRPADCSPYSPNSRLFLNPLYIDVEAIPEFSAELVPDAAVTAARLREGDRVPYTAMANLKWLGLRGAFERFVTSASDARRKEFDAFRAARAPLLSRFACFEVLRHRFAVPWWEWPSEWQRPDEAKCAELRKGPDKREVEFVEFVQWTADSQLHAAKELAGQLGMRVGLYLDVAVGVQSNGFDAWNEQTAISRQLAVGAPPDVLNTIGQDWGLAGFNAGGLEAQSFVPFADMLAASMRHAGAIRLDHVLGLKRLYLVPRGFKPDNGAYVEMPFEALLAVVTRESAAHRCIVIGEDLGTVPEGFRETMQDFGIWSYLVMMFERDDAGHFRNVDHYRPNALVTLNTHDLSTYAGWRSFGDLKMKRSLGLDPGENDQARWDALGRLDEILRQNGIRANDLYSVLAFLSRTPSRLLAVSLEDLLGVVDQPNIPGTIDEHPNWRQRLPVALDKIASKVDLAALKAATRERSLPGGN

SEQ ID NO: 15346 - protein, 648 aa, BradyrhizobiumColbertium
MNKTIQTVESAAAGGTFLIEDVYPSIDGGRFAAKRIAGEPVEVWADIYRGGDAVIAAALIWRKEQDREWRSEPMTHHGNDRWSGAFTPVEPGQYIYAIEAWTDEFATWSRAVARKQRTGADISLDAIEGAGLLTKAHGARQDAAAIIIRRCEDYLQSGDVTPLLTTELGQAMAESQSRPDLTRSPSFPLTIDRDKARFGAWYQMMPRSQSASPGRHGTLRDCIARVPDIAAMGFDVLYFTPIHPIGHTRRKGRDNAPVASDGDPGSPYAIGSAAGGHDALHPELGTIEDFRALVATCLEYDLELALDFAVQCSPDHPWLTQHPEWFKWRPDRSIRAADGPYSDIVIPDFGSVDRAGLWNAFRDAMLFWIDHGVTIFAIDNHDTAPLAFWEWLIRDIRRRHPEVILFSKTYARPKLMKGLAKIGFAQSFTYFPWRTSKWELEQYLGELTRHPERDFYRPHMFVNTPDLLPYHLQGGESWAFKSRITLAATLSGNYGIHSGFELLEHEAIPGREEYLDSEKYQIRQRDWDRPGNIKPYIAALNRVRHENPALQQTANLRFLGIEDGETIAFVKEAAGPGNTVVIVVALSRDVRECWLPLGDVMVDAGGQSHHVTALENLLTGEQSRSEWGGIRLRIDPDRDPALLFRCLA

SEQ ID NO: 15347 - protein, 1097 aa, BradyrhizobiumColbertium
MNVLSSVDTKKVEAAEIVDELWYKDAIIYQLHVKAFADSNNDGIGDFAGLTEKLPYLQELGVTALWLLPFYPSPGRDDGYDIADYGSVNPDFGTMKDFKRFIQEAQKRGLRVITELVVNHTSDQHKWFKRARRSHPGSSARNWYVWSDTDQKYQGTRIIFTDTEKSNWTWDPEAGAFYWHRFFSHQPDLNFDNPRVVSAIIQVMKRWLDAGVDGFRLDAIPYLCEREGTSNENLPETHAIIKRLRQELDAYSRGKLLLAEANQWPEDVQEYFGRGDECHMAYHFPLMPRIYMAIAQEDRFPITDILRQTPDIPASCQWALFLRNHDELTLEMVTDVERDYLWTTYANDPRARINVGIRRRLAPLMDNDRRKIELMNSLLLSFPGTPIIYYGDEIGMGDNIYLGDRNGVRPPMQWSPDRNGGFSRCDPARLYAPLIMDPVYGYEAVNVEAQSRSLSSLLSATKRLISVRKSTLAFGRGTMTFIRPVNRAVLAYVRQYRDEVILCVANLSRAAQATELDLSPWKDRIPQEMLGRTRFPAIGELPYMITLGPYGFYWFQLQERDKSEPVTPRAVPEFETLVVPVNSNWVSLARERGVFERDVLPGFLSRTRWYPEHNPKHIKTALTSAVPFCDIGDNRPWIAFFESGQADAATRYVLPLQIEWVRFDRERFNPRALAAVRQGAREGTLLDVATDQIFIGLLLRNLSQNLVVEENNLRLEFKPTSRFADYTIKEPERVRAIEQSNSTALVDNQYVAKIYRRLESGISPEIEIGHYLTEVARFANTPALLGSVELVEGNQRSALGVLHAYVENQGDGWTVSTGYLDRYIDEQRVMPAGETLRETQEQAPYLHFVAQIGRRLAELHVALAAADADDLAPEPIGSAQIKAWVSDLRARAERVLERLADSRDGLREMDRPLIDRLIAARAGLFDGLNALLPSDIAGLNIRHHGDFRLGQTLIVKDDIFIIDFDGDPRRPLASKRRKLPAARDVAGMIHSIDLSVNAALSRALTGASDEQDRLAAALDEWRGRATATFLSAYREAMTDRRVWPEDRQSADALLRFFLLDQAFDEVEYELSHRPEGLHAPLTGLLRILSSAESEAHA

SEQ ID NO: 15348 - protein, 712 aa, BradyrhizobiumColbertium
MPKLPAEAYAIIEGRHSDPFHYLGLHPEDGRSVVRAFLPEATNVEAVGEHGEVAPLDRVHDSGLFIGALPNGSKHYQLRARFGDNVVEFEDAYRFPPILTDFDLYLLGEGTHQRIYDKLGAHPMRLEGVDGIGFVVLAPNARRVSVVGDFNFWDGRRHPMRVRGNGYWELFIPHAKTGDHYKFEIIGPHGHLLPLKSDPMAFASEVRPKTASIVFDEAHLPRPRPAPDGINSLSAPMSIYEVHLGSWRRTNDNEWLTYRELAEQLPAYARDMGFTHLEFLPVSEHPFDGSWGYQPTGLYAPTSRFGTPDDFAALVDACHREGIGVLLDWVPGHFPDDPHGLGHFDGTSLYEHANPLQGRHLDWGTLIYNYGRTEVTNFLVSNALFWLERYAIDGLRVDAVASMLYLDYSRPPGAWVPNQYGGRENIEAINFLRRFNTEVFARFPQATTAAEESTAWPQVSRPVEFGGLGFGYKWNMGWMHDTLSYISKDPIYRKHHHGEILFGLHYAFSENFILPLSHDEVVHGKRSILGRMPGDEWQRFANLRAYYSFMFGHPGKKLLFMGAEIAQSREWNHDQSLDWHLLEYKYHAGIQALIRDLNRLYRAVPALHQMDCDQAGFEWLITDDASRNVFAWLRKGFDEHARCLVILNFSPNVYQNYRVRVPFGGKWKEVLNSDSAHYGGSNVGNIGEVHAEGGELRLTIPPLAAIFLVPEG

SEQ ID NO: 15349 - protein, 692 aa, BradyrhizobiumColbertium
MRLTAGSPARLGASWDGRGTNFALFSANAQKVELCLFDSQGRRELERIELPEKTEDVWHGYLNDVSPGQLYGYRVHGPYEPEHGHRFNANKLLLDPYAKRLAGRLVWSDAHFAYRTGSPREDLSFDRRDNARGMPKAVVVDETFNWGRREIRPNIPWEDTVIYEAHVKGLTQKRDDVPPNLRGTYGGLSSPAMIEHLKRLGVTTVELLPVHSFVDDRILVEKKLANYWGYNTLSFFAPEPRYAQDNALDSFRTTVARLHDAGIEVMLDVVYNHTAEGNHLGPTLCYRGIDNSSYYWLSRENPRYYDDFTGCGSSVNLTHPRVLQMVMDSLRYWVEVCHVDGFRFDLATTLARGPNGYDRGSSFLTAIRQDPVLATVKLVAEPWDLGLGGYQVGAFPSQWSEWNDRYRSAMRRYWSGEGSLIGDISSRMTASSDLFNHDGRRPRASINHITVHDGFTLADLFSYNEKHNEANGEDNRDGSNDNHSNNCGVEGPTDDPNIISLRRQLRKNVLACLMLAQGVPLILAGDEVGNSQSGNNNAYCQDNEVGWVGWDNLGKDGDDMVDFVAHLADIRRRFSQLRSHRWLDGRPKDGVSYGALWLTPAGDEMTESDWNFPEGRFLSYVMGPMEPGSAAIFIVLNAAPEEIAFKLPKMTEYRSWQQILNTTAAKLNTIDFLPGSDSKAPPRSVLAFAGAP

SEQ ID NO: 15350 - protein, 571 aa, BradyrhizobiumColbertium
MSFRLWAPGARRVDLLLERRHAMQRRQDGWYVADIAGLAAGSRYQFRIDDEIDVPDPASAFQPEDVFGPSEVIDHDVFAWRAREWRGRPWEETVLIETHVGTFTQEGTYRAMMDKLDHLAATGITALELMPLADFAGRRGWGYDGVLWYAPDSAYGRPEDLKTLIDEAHLRGLMVFLDVVYNHFGPEGNYLGRYAPAFFTEAHTPWGSAIDYRVPQARAFAVENALSWLTDYRFDGLRLDAANHILAIPGEQSMLQDLSVAAGELAKATGRHIHLVLENGDNRASLLDAAQEPPNGKYRGQWNDDYHHVWHVMLTGEHAGYYGDYQTPRMDLARALASGFVYQGEISEFWGKKPRGEPSGTLPPATFVNFLQNHDQIGNRPLGERLESLAPPQQIEAALAVTLLAPMVPMLFQGEEWGSKVPFPFFCDFQGGLADAVRRGRRQEYAWAYDKYGDDVPDPLDPATLQSAVLDWTGHTPEQNARLALVRELLALRRKAIMPRLNGASFGGAEAADNGLLTAHWLMGDGAALRLTANLSNKDIAHSSDSAGTPLWGGATGDRLPPWSVVWQLGA

SEQ ID NO: 15351 - protein, 928 aa, BradyrhizobiumColbertium
MPSAVPLATYRLQLTADFDFDKAAAVVPYLKALGITHLYASPVMKARKGSTHGYDTVDHGQLNPELGGDAGFARLSETLKAHDLGLIIDFVPNHVGVHFADNPWWLDVLEWGQASPHAVSFDIDWDQLAYRARGGVLLPILGSSYGEALERGDIELRYAPEEGSFSAWYFEHRLPIAPERYGEVLRMIVKEADAAETQPGERLLALAARYTGLRRPNRKEAPAFKAELKEIAGAADIIARGLAAYGAGKDRTAQTLALHHLLERQHYKLGHWRLASSDINYRRFFDVNGLAGLRVEDPGTFAATHRLVKQLVAEGKLHGIRLDHIDGLRDPAQYCQRLRRLVRDAQGNTKPFYTVIEKILCEHERLPQFAGVQGTTGYEWMNVVTHVLIDPKGLEALDETWRQISNRPPQLAPYVKEAKRRVLEKLLASEFTVLTGLLARIANGHYSTRDFSADSLRQALELYVLHFPVYRTYLTHSGPTAPDRKLIEDTIERARREWFAADEGIFDFLRDALTMDLLKPGRPPHSAPRVRRFALKVQQFTGPMMAKSLEDTAFYQFHRLLALNEVGGDPASTGLTIPAFHQAMQARAKEWPLGMTATATHDTKRGEDARTRIAALSEIPGEWTSAVARWKVLNAAHLTTYGNFRAPSATFEYMLYQTLLGALPLGEEVDAAFVERIQAYALKAAREGKEETSWLNPHEAYENGIRDFIGKILDPAQSAEFLEALQRLARRVALLGTLNSLSQLTLKATLPGVPDFYQGTEFWDLSLVDPDNRRPVDFAARHAALKSLEAPDWNALSKSSPDGRLKLAWTRHLLALRNRLPDIFVGGSYRPLEVRGAHANHVIAFARGHGRAAAIVVVGRHFAPFTQGGREWPSLEGLDATLDISGYAAPGLAGNELPLAPALRDLPVAVIEARSTSAAKPTRQRAHP

SEQ ID NO: 15352 - protein, 105 aa, BradyrhizobiumColbertium
MSAPLIVSIPHRLGREEAARRLKTGLGRAAASIPVMQVEEERWSGDSMNFRIRALGQIASGQVDVGDDQVRVEVVLPWLLQRFAEMAQATIKKRGQLLLTKDGGK

SEQ ID NO: 15353 - protein, 54 aa, BradyrhizobiumColbertium
MSIGTIILIILIIALLGGFSGIGGGPFYGTGYYGGGGLGLVIVILLILILMGRI

SEQ ID NO: 15354 - protein, 904 aa, BradyrhizobiumColbertium
MIGLNPEREAGQVVLQKLSTYRQKRDFEKTPEPSGKTAVAPSKQRRFVIQKHDATRLHYDLRLEFDGVFKSWAVTKGPSLDPHDKRLAVEVEDHPLDYGDFEGTIPEGQYGGGTVMLWDRGTWEADDPEAGFKKGDLKFTLHGEKLHGSWVLVRMRNRGGEKRTNWLLIKHRDGYAREGADNDILEQDKSVASGRAMEQIAEGRGRAPKPFMLAKGTKGKADAVWQSNRAEETKGRTVKPAPRTALKRGKTAKTSATTATKAKKVSAMPDFVAPQLCTLVERPPADEGWCHEIKFDGYRVQLRVEDGEATLKTRKGLDWTAKFGSIAKEASTLPDLMIDGEIVALDHNGAPNFSSLQAALSDGKTDELIFFAFDLLFAEGEDYRRLPLGERKVRLKELLESRKRKLGQIRYVEHFESGGDAVLRSACKLELEGVVSKKLNAPYRSGRTESWVKSKCRAGHEVVIGGYKTTNGKFRSLMAGVQRGDHLAFVGMVGTGFGADKVKRIMPALKAMEAKESPFGGKNAPKKTREVHWLKPELVAEIEFAGFTADGNIRQAAFKGLRQDKPAEEVEAETPVDTELAEPRAKKPARARTGRQPKQAAPNAEVMGVIISKPDKPLWPDDGDGTPVTKLDLARYLEAVGEWMIVHLKGRPCSLIRAPDGIKGECFFQRHAMQGTSNLLELARVSGDRKPYLQIDRIEGLAAVAQIGGGELHPWNCAPYAYDTPGRLVFDLDPAPDVEFADVVEAAKEMRQRLSDIGMDSFCKTTGGKGLHVVVPLRYGARDKVSWKEAKAFAQGVCQWMADDDPERYLLNMSKKLRKGKIFLDYLRNDRMSTAVAPLSPRARAGATVSMPVTWAQVKSDLDPKRYTLRTVPGLLARSKAWEGYDDAATSIKAAIKKLAGKVK

SEQ ID NO: 15355 - protein, 294 aa, BradyrhizobiumColbertium
MAPRAYWKGTLKLSLVSCPVVLYPATTAAEKTRFHLINRETGNRLKQQMIDSETGDIVESDQKGRGYELRKGKYVEIEPEELEAVQIESNHTIDIESFVPSEEVDQRFLNHPYYIAPDGKAAVDAFAVIRDAMKDQDRVALAKIVLTNREHVMAIEPRGKGLLGTTLRFPYELRDEDQFFDDIKSPKITKDMVELAGHILQSKAAHFDPSKFKDEYENALKALVKRKASGKTIELPEPEERPSNVINLMDALKQSLKGRGGGKKAAKSHARRATGRRKTAKKAHRSTARHRKAG

SEQ ID NO: 15356 - protein, 37 aa, BradyrhizobiumColbertium
MARVSASPESISPPVALGMDSGLDASHRPGMTASLLV

SEQ ID NO: 15357 - protein, 229 aa, BradyrhizobiumColbertium
MSAAPIKVLVIDDEPPIRKLLRMGLTTQGYEILEASNGKAALEKLAEEPALIILDLGLPDVQGHELLRTIRTRNEGVPIVVLSSRGDEAGKVQALDLGADDYLTKPFGMEELLARLRAALRHQLQVKGERPVFRAGDLSVDLVRRIVKVGDRDVKLSPKEYDLLRVLVQHAGKVLTHRFLLRELWDELTDAQYLRVYVRQLRQKIEADPERPQYVLTETGIGYRLKAGD

SEQ ID NO: 15358 - protein, 908 aa, BradyrhizobiumColbertium
MMVRERRDPEQRPSPEALLEAARREEGASGKLKIFVGAAPGVGKTYEMLQSAHAKRRAGVDVVIGFVETHGRAETEALVRGLEAVPRKRLDYRGQIVEEMDLDAVIARRPQIALVDELAHTNAPLCRHPKRYLDVEELLSHGIDVYTAVNIQHIESLNDVVAQITHVRVRETVPDSVFDRADAIELIDLTPDDLIQRLREGKVYVPKQAERALEHYFSPGNLTALRELALRRTAERVDEQLLNHMQANAIAGPWAAGERILVCVSEDARAAGLVRYTKRLADRLHAPFTAVSIETRRSLQLSDEERDRLADTLRLAESLGGEALTIPAVGRRIADDVVSFAQGNNVTQIVIGKSSRSRWFEMTRGSVVHDLVRRAGNITVHVIAGDELPGEAPPKTEVQTAARSEPFDPLPYLKALGIVLIGLGAAKLLQPRFGIENVDLVLLTAVVTVAVRYGLWPSLLATVAASLSYNFFFLPPLYTFTITDPTNVAAFLLFLGVAIIVSNVAARVRIQADTAIGRIRMTEQLHAFSRKLAGTATLDDVLWATAYQIALMLKVRVVLLLPDEGLLTVKSGYPPEDELDQADLAAANWAWSNDRPAGRGSDTLPGARRLFLPMRTGRGPIGVTGIDDDRSGPLLTPDQRRLLDALVDQGALAIERVLLVEDMDRVKRTVESERLRSALLTSISHDLKTPLASVLGAASTMRDLAGALSDTEKRDLLATVIDESERLNRFIANLLDMTKLESGAIVPNAALHDLSEIVGSALRRASKILNRHKVELALAADLPMLQLDAVLFEQVLFNLLDNAAKYSPPETTISIRGRRDRAHVVLEIADEGAGIPPDELENVFDKFYRVQKGDHVRPGTGLGLAISRGFVEAMGGTISAANRSGRSGAVLTIRLPVPAESHALDTAA

SEQ ID NO: 15359 - protein, 201 aa, BradyrhizobiumColbertium
MFREIRPAIALLLALTAITGLAYPLAMTAIAGTLFPVQAQGSLIEKDGKVIGSALIGQEFRDGKYFHGRPSATLAPDPNDSAKTVPAPYNAGSSGGSNLGPTSKALADRLKQDVDKLRGENPNAAVPVDLVTTSASGLDPDISPEAAQFQVPRVAKARNLPEDQVKQLVAANTQGRLLGLLGEPRVNVLALNLALDRMAPK

SEQ ID NO: 15360 - protein, 704 aa, BradyrhizobiumColbertium
MNMAKLQKRAPMSAMLDPGIVMPAVKASFTKLDPRWMVKNPVMFVVEVVAALTTVIFLRDVATGGAGLGFTFQIILWLWFTVLFANFAEAVAEGRGKAQAETLRKTRTESQAKLLSGAGRDYELVSGTSLKVGDVVLVEAGDTIPSDGEVIEGVASVNEAAITGESAPVIRESGGDRSAVTGGTQVLSDWIRVRITAAQGSTFIDRMIKLVEGAERQKTPNEIALNILLAGLTIVFVFATVTIPSYAAYAGGSISVIVLVALFVTLIPTTIGALLSAIGIAGMDRLVRFNVLAMSGRAVEAAGDVDTLLLDKTGTITLGNRQATAFRPVRGVTEQELADAAQLASLADETPEGRSIVVLAKEKYGIRGRDMTELGANFVPFTAQTRMSGVDAAGSSVRKGAIDAILNYVGGGAPTAVASGNTARVVQPAALSELGREIQAIADDVSKSGGTPLAVARDGRLLGIVQLKDIVKGGIRERFAELRRMGIRTIMITGDNPMTAAAIAAEAGVDDFLAQATPEDKLRLIRDEQAKGKLVAMCGDGTNDAPALAQADVGVAMNTGTQAAREAGNMVDLDSNPTKLIEVVEIGKQLLMTRGALTTFSIANDVAKYFAIIPAMFLAFYPQLNVLNVMNLSSPRSAILSAIIFNALVIVALIPLALKGVAYRAVGAGALLRRNLLIYGLGGIVIPFIGIKAIDVVVTALHLA

SEQ ID NO: 15361 - protein, 567 aa, BradyrhizobiumColbertium
MTVIGWLQIILYCAIVVALTKPLGWYMTRVFNGEHTFLSPALRPIEVGIYWIAGVDEKREQHWLTYTVAMLLFHVGGFLIIYGLMRLQAMLPFNPAGQSAVAEDLSFNTAVSFITNTNWQNYGGESTLSYLTQMLGLTHQNFLSAATGTVLAIALIRGFSRASMRTVGNFWVDVTRCTLYVLLPICVVLTLFLVWQGMPQTLGPYVEATTLEGAKQTIAVGPVASQVAIKMFGTNGGGFFNANASHPFENPTALSNFVQMLSIFVLGAALTNVFGRMVGNQRQGWAILAVMGVLFVAGVAACYWAEANGTSTLHALGLTGGNMEGKEVRFGIVASSLFAVITTAASCGAVNAMHDSFTALGGMIPLINMQLGEIIVGGVGAGMYGMLLFVILAIFVAGLMVGRTPEYVGKKIEAREVKMAMLAILVLPLMILGWTAIGVVYPAAVASMANAGPHGFTEVLYAFSSGTGNNGSAFAGLTGNTFFYNLTLASAMFVGRFFMIVPAMAIAGSLAAKKSIPPSMGTFPTTGGLFIGLVTGLILIMGGLTFFPALALGPIVEHLAMTAGNVF

SEQ ID NO: 15362 - protein, 53 aa, BradyrhizobiumColbertium
MTVMALTLQASGPAAQERQEQRKQARDERGVGQQQFDDQQHGLRTARAAATRR

SEQ ID NO: 15363 - protein, 49 aa, BradyrhizobiumColbertium
MRSPESRESGRPDNEGATRSIAMMDFLMLVLAVTFFALAIGYTYACERL

SEQ ID NO: 15364 - protein, 211 aa, BradyrhizobiumColbertium
MSTGSVNVVNHPLVQHKLSLMREKDRSTKSFREILNEIGMLLGYEVTRDLPLELVDIETPIAPMQAPKIAGKKLTLAPILRAGVGFLDGMLALMPSARVAHIGLYRDPETLQAVEYYFKAPQDLSDRTVILMDPMLATGNSACAGASLLKARGARDIRFVCLLAAPEGIAQFQSEHPDVPIWTAAIDERLNDHGYIVPGLGDAGDRMFGTK

SEQ ID NO: 15365 - protein, 524 aa, BradyrhizobiumColbertium
MSANDFSLQSLIRIETAADPAFVFDATAVSRAEFSAKVEQTAAWLAAQGIGKGDVVAVWLVNRAEWLALLFAAARLGAIVAAVNTRYRSAEVAHLLKLSGARLMVVEANFRSIDFAAILAGIAKNEVPALQKLAVVGADAIPAHWPFVCFDAFDRPYPPAPPAQDDIDLPVLLYTTSGTTKGPKLVAHSQRTLATHAVSVARALQLNPQRHSLLAMLPFCGTFGMTSLLGFVAAGATVHALDAFEAAPALAILREHRITHSFGSDEMFRRILAHTDAPRPFPYIELCGFAAFQPGWRELAAEAEARGLPLHGLYGSSEVQALFSIARASDAFADRIEGGGWPMSPDAKVRVRDTDTGELAASGVSGEIEISAPSRFLGYFNNPEATREAITADGFFRTGDIGHLRGDGSFVYETRAGDAMRLGGFLVAPGEIEDELKSCAGVADAQIVAVDLKGQARCVAFVIPAKEPPMQEMLVAHLRERLAGYKVPARIYVVDAFPVTDSANGVKIQRARLRAMAIERIAAE

SEQ ID NO: 15366 - protein, 388 aa, BradyrhizobiumColbertium
MDFALTDQQEAIRDAIAKICEGFPDAYWLKKDHDGGFPHDFHKALADAGWLGICVPEEYGGSGLGITEAAIMMRTIAESGAGMSGASAVHINVFGLNPVVLFGTEEQRRRMLPPMVEGREKACFAVTEPNTGLNTTQLKTRAVAKNDRYIVNGQKVWISTAQVAHKILLLARTTPLEEVRSPTHGLSLFYTDFDRNRIKVHEIEKMGRKIVDSNELFFEDFEIPMEDRIGEEGKGFEYILEGMNPERILIAAEAVGLGKLALSRATEYAKTRVVFNRPIGKNQGIQHPLAVNWVELEAAWLMVMSAAWQYDKGMPCGAAANAAKYLAGEAGFSACEQAVMTHGGFGYAKEFHVERYLREVMIPRIAPVSPQLALSFIAEKVLGLAKSY

SEQ ID NO: 15367 - protein, 171 aa, BradyrhizobiumColbertium
MHRVMRRDGKSAPLFRREETAMAGLYFEDFSVGQEFRHPLTRTVTEMDNTMFSLLTLNPQPLHIDAHFAEKTEFGQRIFNSLYTLGIMIGMTVYDTTLGTTVANLGMTDVTFPKPVFHGDTLRATTKVLSVRESRSRPMAGIVEFEHHAYNQSDEIVGKCRRMAMMHKRPV

SEQ ID NO: 15368 - protein, 296 aa, BradyrhizobiumColbertium
MPPHGDDAQEAGLMRSMLFVPGDSPRKFEKASEGKADALIIDLEDSVVTEKKPEARSLTLAMLKGNRGPHQLYVRVNALDTGMTLADLAAVMPGRPDGIVLPKSQGGDDVRRVATWLEALESASGTEVGATRIVCVATETAGSIFGLGSYKGCSPRLAGLMWGAEDLSASLGATEKASGGVFHSPYRLARDLCLMAAAAAEVAPIDTVYTDIDNLAGLEQETHAARRDGFSAKALIHPKHVDIVNAAFEPTDAERTWAEKVIAAFASNPNSGTLRLDGQMIDKPHLRAAKKILGQP

SEQ ID NO: 15369 - protein, 127 aa, BradyrhizobiumColbertium
MTKALITAVAMLACVPASALAQERAGDAALGAVSGAVVLGPVGAVAGALIGYTAGPSIARSWGIRGSHSARHRQPPRRAVVRGGAPRTREAMAANGQMRAAGNPAAPVQAAPSVSAQPSAPPVQAFD

SEQ ID NO: 15370 - protein, 79 aa, BradyrhizobiumColbertium
MLDENLARILRSAGRRDEGGTMNSRRDLLIRGSEKVIGHYELLLASAKTEHERELYLQRIERERRLIRSLQWELDHRAA

SEQ ID NO: 15371 - protein, 369 aa, BradyrhizobiumColbertium
MMNAVRLLFLALLVLTLTASQPAAGQIPEMKTGGPVPTLAPLVRHVTPAVVNISVHGRVREDNPLYRDPLFREFFDVPRQIEKEVNATGSGVIVDAQRGYVLTNNHVVEGTSAVQITTKDGRQFSAKVIGRDPPTDVAVLQVQNPVGLKALPFGDSDGLEVGDFVLAIGNPFGLGQTVTSGLVSALGRTGLGKQGYEDFIQTDAAINPGNSGGALVSLRGELVGINSAIISPAGGNVGIGFAIPVNMARKVMEQIIANGRVERGRIGISLKDLHPSVNKGLNQGAVIAEIAAGSPAEKAGLRKGDVVTGADDRPIRTAAQLRNTIGLARVGEDVKLTLLRNGAPFTASVRVAPAVQPSSALAGPNRLLR

SEQ ID NO: 15372 - protein, 38 aa, BradyrhizobiumColbertium
MMVTPTVLGLVLLGQASAAWAVPFLALQGWVVAPRGEG

SEQ ID NO: 15373 - protein, 111 aa, BradyrhizobiumColbertium
MTNVNTNPGTLNPLFHPAAHYDSPAEVLNAKDLSAPEKRIILSSWASDMYAVESCPALREIPGMSHAVRLVDILAALRKLDGDNDNDDPPRGGGVPMRLRRPWAAAERRAA

SEQ ID NO: 15374 - protein, 163 aa, BradyrhizobiumColbertium
MAFRDLIPWSRNQELAPARDNFDPFLTLHREMNRLFDDVFRGFGGTGLSPLMEGRFGWPKVELSETDKTLTVSAELPGLTEKDVQVEMASGVLTIRGEKKAERNGEGRYFTERYYGAFERQIPLEGVEEDKAEASFKNGVLTVSLPKSEKAREGVKRIAINTH

SEQ ID NO: 15375 - protein, 153 aa, BradyrhizobiumColbertium
MRTSFDFAPLWRSTIGFDHLADLVDSTLRQATEDNYPPYNIERSGEDHYRISLAVAGFGVNDITVTAEQNALTIEGRKPETAAREYLYQGIAARPFRRVFNLADYVQVKQASFQDGLLIIDLVREVPEAMKPRRIPIAGGASAASQIEQKKAA

SEQ ID NO: 15376 - protein, 433 aa, BradyrhizobiumColbertium
MTAAIGFSAAAEKSKTAHVVWASALGTAIEWYDFLIYGTAAALVFNRLFFPSFDPFVGTLVAFSTYAVGFVARPIGGAIIGHYGDRLGRKTMLVATMIAMGLGTFLIGCLPTYDQIGIWAPILLVCLRFVQGIGLGGEWSGAVVMVIEHAGRRRGFYGSLVQIGFPVGVAASTGIFALMTKLPEADFLSWGWRVPFLISILLVGVGFIVRLKLAETPHFKEVVERKEVLAQPVLEVLRRDWRSFLLAVGITVSEVGLAYLLTVFTVVYATTKLGLPRQVILDAVVYAAVVEFATLPLAGWLSDIFGRKALYLAGGVFSVALAFPLFWFLDTGEPALITLALVVTMTLTHALLFGPKAAFMPELFRTKVRYSGASLGANVAAALSGGFSPLIAAGLLAWAGSYWAVSVYIIALSVVTIIATLLAPETARDALRS

SEQ ID NO: 15377 - protein, 268 aa, BradyrhizobiumColbertium
MISDVKLAAAGATFAEAGPATLTETLSFNGVLRANQETVVQVTPRFPGIARAIKKRIGDVIGKDDLLASIESNQSLTVYDLKAPIAGTVIDRQISLGEYVSEQKPSFVVADLSTIWVDLSIYRQDLRRVRIGDEVLIDPDDGAGDIKGKISYLAPVGASETQTAIARVILPNPDGRLRPGLFVTARLVLAERKVGVAVRTGAIQTFENKTVVFVREGDDKLEARPVELGDSDQKFVEVRAGISPGEKYVAENSFVVKAEMGKGEAEHD

SEQ ID NO: 15378 - protein, 93 aa, BradyrhizobiumColbertium
MQGLALLVQEGLGRDPFAGDVFVFRGRAGTLIKALWHDGIGLSLYAKRLDRGRFIWPATVDGVVSLTAAQMGYLLEAIDWRNPQHSWRPQSAG

SEQ ID NO: 15379 - protein, 163 aa, BradyrhizobiumColbertium
MTVRQKLPEDIEALQAALLATRAELASVRAQQSDDHALIAHLKLQIEKLNRDRYGPRSERTARLLDQLELTLEELEASATEDELAAEMAAAKTTKVASFTRKRPSRQPFPDHLPRERVLVPGPVACVCCGGARLSKLGEDITETLEVIPKSWKVIRKRSFCPI

SEQ ID NO: 15380 - protein, 428 aa, BradyrhizobiumColbertium
MVGMAIAVATTLASHPPADGMAWVLVILAVAIGGGIGAVIARRVPMTSMPELVAAFHSLVGMAAVLVAAGAFYAPEAFDIGKPGAIHASSLVEMSLGVAIGALTFTGSVIAFLKLSARMSGAPIILPARHIINIALALALVFFIVRLVLTGGAFDFWMITIIALALGVLMIIPIGGADMPVVISMLNSYSGWAAAGIGFTLGNSALIITGALVGSSGAILSYIMCHAMNRSFISVILGGFGGETAAAAGGSGEQKPAKLGSADDAAFIMKNASKVIIVPGYGMAVAQAQHALREMADVLKKEGVEVKYAIHPVAGRMPGHMNVLLAEANVPYDEVFELEDINSEFAQADIAFVIGANDVTNPAAEEDKSSPIYGMPVLQVWKAGTVMFIKRSLASGYAGIDNPLFYRDNTMMLLGDAKKVTENIVKAM

SEQ ID NO: 15381 - protein, 56 aa, BradyrhizobiumColbertium
MAINKEWHRSHPMPPKATREQRVAWHAAHRAACGCRDIPASLRPDVIKLLRSHRKP

SEQ ID NO: 15382 - protein, 265 aa, BradyrhizobiumColbertium
MTFIKWTAILLATVYLAGLVVLYVRQREMLFPIPPVGRTAPDAAGLPEAEEHVLITSDGEKVIIWHVPAKPGRPLILYFPGNGDFLAGRISRFKAMTADGTGLVALSYRGYAGSSGAPSEQGLLRDAEAAYAFTIARYEAERIAVWGFSLGTGVAVALASERRVGKLILEAPYTSTADIAAASFWYVPVPLLMRDPFRSDERIARVTVPLLVMHGTNDFAISIVFGERLFALANEPKRFVSMAGGGHDDLDQFGAVETARDFIGS

SEQ ID NO: 15383 - protein, 48 aa, BradyrhizobiumColbertium
MRSKPREILSAVDNLFVRYIWALAAFCRADSAFLLLTLLPVAPILHWH

SEQ ID NO: 15384 - protein, 353 aa, BradyrhizobiumColbertium
MFPALAVLLFAAVTATDYVFTLSLGGLVFAIVLLVILFGTVFAAVHHAEVIAERVGEPYGTLVLTLAVTIIEVALITTIMLGDKPAPALARDTVFAVVMIVCNGLVGLCIFIGGLRYREQGFQLSGANVYLSVLFALATITLILPNYTTTAPGPVYSAVQLGFVDVVTLALYGVFLYTQTVLHKDYFVHERAEGEAGEVHRSAGALALTVVLLLVSLLAVVLLAKKFSLVVDAVAARIGAPPAFAGLLVALLILMPEGVAAVSAARKNDLQKSINLALGSSLATIGLTIPAVGLATYALEKELELGLNAQGSVLMLLTFFLSMLTFGTGRTNVLFGLVHMVVFAVYVFMVFVP

SEQ ID NO: 15385 - protein, 38 aa, BradyrhizobiumColbertium
MRGAETIRPTIFQYCFKALARLIGLSRAKDHGISEARA

SEQ ID NO: 15386 - protein, 387 aa, BradyrhizobiumColbertium
MRIQRRQGAALLATIAIVATIGGAIIFEGDRTALAQAPATAPVSAAVATVQRSDIALWESFSGRFEPVEAVDVRARVSGAIRSVLFEEGAIVQRGDLLVVIDPDPFRAEVERLQAQVAMAEARARFTRSESDRADRLVETNAIATRDRDQRTNAAEEAAANLSMARAALRSAELSLSYTEVRAPISGRIGRREITVGNLVDAGPSAPILTTILSVDPIYAGFEADERTVARALADIRGDRGHINTIPVSADIGGDAPPLQGRLQLVDNRVDARSGTVRLRAVFENTQGMFTPGQFARIRLGRAQREPVILIPEEAIGTDQSRRFVLVVDGDNRTARREVQLGQLLDGSRVVTSGLQPGERIVVSNLQRLRPGAQVQPRTDGARPSTS

SEQ ID NO: 15387 - protein, 1064 aa, BradyrhizobiumColbertium
MNISPFFINRPIFAGVLSALIFIAGLIAIPNLPVSEYPEVVPPTVIVTARYPGASPTVIAETVATPIEESVNGVENMLYMSSQATTDGLMTLVVTFRLGTDPDLATQLVQNRVQQAEARLPEAVRRLGVTTIKSTPDLTLTVHMFSPGGRYDMNYLHNYALLHVRDRLARIPGVGQVMIRGAGDYSMRVWLDPEKIAERGLSASDVVTAIRNENVEAAGGALGATPTAEGVRTQLTVNVRGRLRNTEEFENIIVRTASDGAITRLKDVARVELGSAEYAVRSLMDNQPAAALFVLQAPGSNTVEIGRQVRVVMDELKRTMPAGVDYRIVFDPTQFVVASIDAVVHTLFEAVLLVVLVVILFLQTWRASIIPLIAVPVSIIGTFAVMALLGYSINALTLFGLVLAIGIVVDDAIVVVENVERNIEAGLTPKEAALRAMREVTGPIIAIALVLVAVFVPLAFTTGLTGQFYRQFAMTIAISTVISAINSLTLSPALAALLLRAPDAPKDWPTRQMDRVFGRFFGWFNLGFSRGGHAYGAGVKRILARRLSVLVVYGGLIVVTTLLFHTVPGGFVPQQDRTYLIASATLPDGATLDRSEDVVRQMGEIALKDPDVRASLAFPGLSVNGQLNSTNAGIAFINLQPFAARRGANQSAAAIRDRLRVAFAQIENARIVIFPPPPVRGLGATGGFRLQIEDRASLGYAALDAAVKAFLERASRQPELNGMFSSFQVNVPQVDADVDRERARQLGVSIPDIFSTLQVYLGSFYVNDYTQFGRTYTVRAQADAPFRASMEDLGALKVRSGTGEMIPLATLMTIRQSAGPERAMRYNGFPTADVSGTAAAGYSSGQAQAAIERTAAETLPPGISFEWTDLTYQQILTGNNSIWIFPLALILVFMVLAALYESLVLPLSILMIVPMAALSALAGIWLTGGDNNIFTQIGLVVLIGLSAKNAILIVEFARELEFAGRTPVQAAIEAARLRLRPILMTSCAFIMGVVPLVLSSGAGSEVRRVMGVTVFSGMLGVTLFGLFLTPVFYVVLRKLSGDRPLAHHGAEVEGIAERPAAAAE

SEQ ID NO: 15388 - protein, 52 aa, BradyrhizobiumColbertium
MLFPALTPAAGVLFGSSLTGELPTITQASFLALSALGALFLLAASRQPRTMA

SEQ ID NO: 15389 - protein, 56 aa, BradyrhizobiumColbertium
MILLITEANRKGALLRLQWTAMGTRDIDNRRPDIAYHPSAAPIRNDVWLATSGVDT

SEQ ID NO: 15390 - protein, 287 aa, BradyrhizobiumColbertium
MTQKIWFITGVSTGFGRAIANAAIAAGDTVVGTLRNEEQRKAFDNVAPGRTHGVILDVTDNAKIHPTVDRVEREIGPIDVLVNNAGYGHEGTFEESSLEDLRRQFDVNVFGAVAVTQAVLPHMRQRRAGRIINITSMGGLITLPSLSFYHGSKFALEGLSEALGKEVKGFGIFVTAVEPGSFRTDWAGRSMNRAPRRIADYDALIDPLREKRLAMSGKQLGDPAKLGEAVVKIANAENPPAHLLLGSDARTLVDRKLSDLRAEYDAWNDLTLSTDFNDKASAGNSWA

SEQ ID NO: 15391 - protein, 77 aa, BradyrhizobiumColbertium
MTARQRDCQASLGSPGIARSERFATKHINERSADDFASVPFGDEKSPPFRSGAHGVIDGATTEHRISLRRTPRALPF

SEQ ID NO: 15392 - protein, 289 aa, BradyrhizobiumColbertium
MTQIDARPSGTFAIGGDMTINRLGFGAMRITGPGIWGEPEDRPEALRVLKRLTEIGVNFIDTADSYGPFVSEELIAEALYPYDGLLVATKGALVRPGGEPNPWPIVGDPHYLRQAVRMSLRRLKVERIDLWQLHRIDPRVPQDEQFDVVKSFIDDGFIRHAGLSQVSVEQIEAARKVFPVATVQNLYNLGNRADEDVLDYCEANGIGFIPWYPLAAGSLARPGGLVDKLAKAKGVTPGQIAIAWLLKRSPVMLPTPGTSRVKHLDENVAAASITLSEDEFAELDAVSRA

SEQ ID NO: 15393 - protein, 307 aa, BradyrhizobiumColbertium
MSAAETKSPVHTPAVTAKQVTFGTIKVDDLNIAYREAGDPNAPKLVLLHGFPSSSHQYRNLIQALSGRFHVIAPDYQGFGNSDVPDPATYAYTFDGISETMEKFLAAKGFDHFGLFVQDYGGPVGFRIVGRHPELLDWLIIQNSNAYEEGFTPAWDGFRGALWKNRSPETEKPLAAFLTRDAIKSIYLHGATHPELISPDNWESDYGFMQRPGAVRLNLDLFYDYRKNVELYPVWQKFLRERHPKTIIFWGQDDVFFTPQGGEAFKKDLPNAEIHRLAGGHFAVEDNLDYIASNMIRFYNANVAKKR

SEQ ID NO: 15394 - protein, 42 aa, BradyrhizobiumColbertium
MTCCSPQMSGRISELESSQQQCKQSVGRKDDAGHALIEPRKR

SEQ ID NO: 15395 - protein, 365 aa, BradyrhizobiumColbertium
MGPILPSIIDEFRLSHAMASLLTSIPDILMGALALPSPWLARRFGRDPVILAALLLLAISIAGRAFATGVFPLLVATAGVGAGIAITGALIAGFIKARFATKAALLMGLYATALSLGSTVSAAVTGPIAIQTTGGWRLASGMWSVLALFGIAGWLAVVLNERRHRAVVPVSGQRVRLPLGNPTAWLVSLFFACVNFLFYAMVSWTSPMYREVGLSTTLAGLVLASFTAVFTVANPVFGWLSRSHDRRGWLAICAALSLAGLVPTALAPGLAPFIFIPISAIGLGGAFTLGMTLPLDNTNSVEEADMWNAFALTVGYLIAAGGPLVVGYLRDVTGDFRSGWWLLVAVSAVMLALTPFLHPSRSTHH

SEQ ID NO: 15396 - protein, 328 aa, BradyrhizobiumColbertium
MNKSTIALPRRSILAGLAAAPGAAMLASATNALAQTASVAPAANNIRYLTQKVGDVEVYYREAGPADAPTILLLHGFPTSGHMFRDLIPLLSDRYRIIAPDLPGFGLTKAPPHGQFTYSFDSLAQVVNGFVEAINLKRYAIYIFDYGAPTGLRVAMAHPERVSAIITQNGNAYVEGLSEGWNPIQKYWKDPSDTNRQALRDFLKPDSVRWQYLQGVPDPTLVSSDGSNLDSYYLSRPGIDEIQLDLFLDYRSNVALYPAFQAYFRKEQPPVLATWGKNDPFFVPAGAEAYKRDLPKAEVHFFDTGHFALETHHREIAALIGDFLAKNR

SEQ ID NO: 15397 - protein, 241 aa, BradyrhizobiumColbertium
MLVSFEKEEIMSSKLNGKTVVLVHGAFADGSSWARVIPLLEAKGLKVVAVQNPLSSLEDDVAAARNAIDQQSGPVILVGHSWAGVVIAQAGVHEKVESLVYVTALAPDQGQSVVDLLAGNVPAWADSLEKDAGGFVKLAANTVGKYLAHDLPDSEVRIIAATQGPWKWDCTSQKVTEAAWRSKPSWSVVAEQDQLIPGEFQEQMAKNIGAQIVKVPSSHVVILSHPEKVAETIIAAAEAAR

SEQ ID NO: 15398 - protein, 62 aa, BradyrhizobiumColbertium
MSGEERLNVAFSLIAASGVVANIIPAGTAARSFDVFAFHSSRRWSGRAFARSAGPWRGDRRL

SEQ ID NO: 15399 - protein, 38 aa, BradyrhizobiumColbertium
MIVEDPKVDQDAITEERDWFASAETSHGAGVSSRLQRL

SEQ ID NO: 15400 - protein, 61 aa, BradyrhizobiumColbertium
MSHDLSLAQNHAFQLARTLMIPVTLFKSGDAYGALPSNELDDGDDVEFIHEFDPYERGPAQ

SEQ ID NO: 15401 - protein, 83 aa, BradyrhizobiumColbertium
MSTRDQKPRHLRRIDPSQNMRRFYVLSLQPTLFGGASVVRSWGRIGTFGQSMMETFDHLDAANDAMIQLEKSKRRRGYRDTDI

SEQ ID NO: 15402 - protein, 406 aa, BradyrhizobiumColbertium
MQPRGKIVVASQHYPPDPSTTAAIMAEIACRLSAEHEVVVLSGSPGALPAAQTGPGKPRVVAIRNRMAGKAALVRRGASELLFAGRTFFALVRELRRGDVVLTVTAPFMLPYAVAAAARVKGARSALIMHDLFPDVLVMAGLLKPGSVVTRTMRAANSLMFRALNAVITIGRDAERPLLSYSGMRRSKIRFIPNWATLAPAPRPVSADNPFRKSIPARFIVGLSGNLGFTHDPDVVFEAARLLQEEADIHFLLSGWGIGFERLKQLQATANLSNVSFVGRVEDSELEAFLASADVWIIPYRKDVAGVSVPSRFYNLLAVGRPVVLVSEPEAEAALTVAESRLGWVVPPGRADRLAEAIRAAFRSDDATIAVRAVKAASRFDKTTAMNAYAELIGELLRNPNLSEQG

SEQ ID NO: 15403 - protein, 315 aa, BradyrhizobiumColbertium
MNERQPVVLVTGASGFVGRHLVPALAHAGWSVRRAVRSPEGAGDEVVIKSIGPETDWQAALEGVEAVIHLAARVHHKHEEHAVQLYRNVNIAGTLHLARSAATAGVRQFIFISTALVHGRSNEGRAPFSENEVLTPRGLYGMSKAAAEAGLRTLARDTDMKITVLRPPLVYGTGAKGNFALLTRAISAGLLLPFAAINNQRAFLAVQNLSSFILHRLSHPDPASNFEIFLVADTEQVSTPEFIRRLATASGKNARLFGMSPRLLSTLLNVMGRQDTQDSLIGSLELNISKALATGWQPQISIDEGLRHALSDQDA

SEQ ID NO: 15404 - protein, 339 aa, BradyrhizobiumColbertium
MSSAADALAGAPLLLAAAIAALISALVTWISRPLLQRYALARPNARSSHRIPTPQGAGIAVIAATLLVAWIWSASANVAIPPALVAATIVIALVGFADDIVSLPVLVRLVLQAACVGAVVFTTPESARIVPALPLGLERGLIVLAGVWFVNLVNFMDGLDLMTVAEVVPVTAALLLLGVLGDLSWPAVLIATALCGAMLGFAPFNRPVAKVFLGDVGSLPIGLLLGWCLLELAFRGQPAPALLLPAYYLADSTITLFRRIIRHEPFWSAHRTHFYQRAIDNGFTVERVVGETFALNLVLAILAIITVRAGSITITIVALFGGAGAVALVLQRFSRAQAS

SEQ ID NO: 15405 - protein, 358 aa, BradyrhizobiumColbertium
MASLHDGYCKIGAKTIPKRPNSAPRVGLPQFFANPHAGEMRRILLSTAKIVISVALLYLALRKVDLSELFSRFTITSLFWIGVAIAITFLQIFVGVLRWREISAACGAPLELGRAMRYNVIGSFFNQTLPSAIGGDAVRLWLVARAGAGWRAATYSIFVDRAIGLIALAILIVASLPWSYTLITDPHGRSALLLIDLLALAGGVGFLIFGALKWRWLKTWWATHHIHACAVIANRVIFSRTRGPIIAILSVLVHVLAVVIAWCVVQSIAAPVRFSDVFLLVPPVMLITMMPISIAGWGVREATMSLAFGFAGLSANEGVNVSLLFGAVFFMVGAVGGLVWILSAEKAAQGSAPIGVPE

SEQ ID NO: 15406 - protein, 329 aa, BradyrhizobiumColbertium
MTDQAILVTGAAGFIGFHVARQLLGEGRPVVGLDNLNSYYDPALKKARLELLKGDSRFSFVQADLADRETMATLFAQHRFAKVVHLAAQAGVRYSIEQPQAYADSNLVGFLNVLEGCRNNGCRHLVYASSSSVYGANTKLPFAVADRTDHPVSLYAATKKANEVMAQSYSHLYRLPVTGLRFFTIYGPWGRPDMAMFLFVNAIMAGKPIRLFNHGKMRRDFTYIDDATRVVSKLIDLVPANDAAAANAPSKLYNVGNHRPEELMHVIGLLERELGRTAIKELLPMQPGDVLETFADVEDLMRDTGFAPSTPIEHGVHNFVTWYRDYFKV

SEQ ID NO: 15407 - protein, 470 aa, BradyrhizobiumColbertium
MDKRIIPLIMCGGAGTRLWPASREVRPKQFLPLFGTRSTFQDTLLRVSDPQLFDRPIVITNASYRFMVLEQLAEIGIEADVILEPMRRDSGPAIAAGAVFAQNRASEAIVLALAADHVVQDNAAFVAACREGLAAANAGRIVTFGVKPERPATEYGYINPGEVISGEVHAVARFVEKPDAVKASDYVNSGYLWNSGNFMFPAALLLDEYRKVDAASVEAITNAVNHAGRDLGFVTLEPEAFAAAKAISIDYAVMEKTSRAAVVPVSCGWSDVGSWHAVWELSEKDALGNAAHGTAVFEDSRNCNVTTDSALVALEGVDDLVVVATADAILVSRQKDANGLKRLVTKLKAVAPKVTEEHLKVHRPWGSYQSVDNGERHQVKRIVVKPGGRLSLQKHHHRAEHWIVVRGTAQVTVNETVKTVHENESIYIPMGAVHRMENPGKIQLELIEVQTGSYLGEDDIIRIEDDYQRS

SEQ ID NO: 15408 - protein, 334 aa, BradyrhizobiumColbertium
MSSRGSAPVKAALRVGVIGAGVMGSNHARVLSGLPGVTLVGVVDPSPAHRARAMELANCESFETLDQLVAEGVDAVTIAAPTHLHHEVALACIAKNIHVLVEKPIASTVDEGHEIVAAAQKAGVTLMIGHVERFNPAVAAVKQAIAGEDILSIAITRVGPFPPRMSNVGVVIDLAVHDIDLIRWFTESDIVEVQPQLSSAVAEREDIALLQFRTANGVLAHINTNWLTPFKARSVTVATRGKYVMGDLLTRQVTECFGFKPDGSYSMRHLPVGHDEPLRAELIAFLKAVRHGETPAVTGDEGVASLAIATQCLETPSRPAATSPARKAARRVAG

SEQ ID NO: 15409 - protein, 393 aa, BradyrhizobiumColbertium
MSSAQTSQGAMNQHLRSEPIPFIDVASQRRRLGASLDAAVKRVMDHCQFVNGPEVFELEKQLAAYCGAKHVIACASGTDAILMVMMAKNFGPGDAVLCPSFTFIATASPVARTGATPVYVDVDEATFNMSPESLKRGITTARKAGLKPVAVIPVDLFGQPADHDAIAEIAKAEGLFVLDDAAQGFGASYKGRKLGTFGHATATSFFPAKPLGCFGDGGAIFTDEDELAATLRSIRVHGQGVDKYDNVRLGLTGRLDTMQAAILIEKLKIFDDEIAARNEVAERYARGLSNVVTVPRLAPGNTSVWAQYTIRLPKGTDRDGFAAALKAQGVPTAIYYGKSMHQQTAYKHYPVAEGGLPGCESLSQDVISLPMHAYLTEADQERVIAAVRGALAG

SEQ ID NO: 15410 - protein, 508 aa, BradyrhizobiumColbertium
MLGRIFTVGGYTLLSRLTGFVRDIMLAAILGAGPVADAFFVALRLPNHFRAIFAEGAFNAAWVPAYAHVHGEKGEAAASLFADRIFTLLLASQVVLLVVAWLFMPQAMSILAPGFSEDAAQRKLAIELTRITFPYLLLITLVTLYGGMLNVMQRFASAAAASIFLNVAMMMTLALAAWFPTAGHAAAWGVLISGFLQYFLLAGDLARHGGLPRFAPLRLDEDIRDFFKALGPATLGSMGTQVALFADTIIATFLPAGALSALYYADRLNQLPIGVIGIAIGTVLLPEMSRRITANDDDGAMKAQRRAFDFTLLFSIPFVAAFLTVPDEIMRALFARGAFSQADAVAAGGTLAAYAIGLIPFVLIRSAVATFYARKDTATPVRASLTGIAVNVALKVALMGSLAQIGLALATAVGVWTNLLLVLFFAVRRGFLVLDRGWLLSLGKFLLTGLVLAAAFWLIAHFSGPLLGSIHFRDELTLVVLAVGGAIIYAIAVLALFGRNWVISLVRG

SEQ ID NO: 15411 - protein, 769 aa, BradyrhizobiumColbertium
MAAPIKFGVGQSVLRKEDDALIRGKGRYTDDFAPQAALRCLVLRSPHAHATYTIDASRARSLPGVALILTAEDVKDLGNLPCLFNLETDPFTGPPYPILAKDEVRHVGDAVAFVVAETIDQARDAIEAIDVKWSPLPAVTGVVNAVKKGAPQVWPDKPGNVLFDVSIGDKAATEAAFAKAHAVAEISIVNPRVVASFLETRAAVCEYDAKRDHLTLTVGSQGSHRLRDILCQNVLNIPTDKMRVICPDVGGGFGTKLFPYREYALMAVAARQLKKAVKWAADRTEHFMGDAQGRDNVTTAKMALAEDGKFLAMDCDLMGDMGAYLSTFGPYIPHGGAGMLPGLYDIQAFHCRVRTIFTNSVPVDAYRGAGRPEAAYVIERLVDACARKLDMTPDAIRRKNFIQPKALPYKTATGKVYDSGDFAAHLKRAMEIAEWKEFPKRAKLAKKHGLIRGIGLASYVEVCGTMGEETANVRLDPNGDVTVLIGTQSSGQGHQTAYAQIVAEQFGVAPERVHIHQGDTDEIATGLGTGGSASIPSGGVSVERATRELGSRLKEIAAQALEASAGDLEISEGVIRIAGTDRSISFADLAKRPGVDPSKLNGSATFASADGTYPNGTHVAEVEIDPATGIIKIVNYVIVDDFGKTLNPLLLAGQVHGGAMQGIGQALMEQVVYGATDGQLITATFMDYALPRAADGPAFVFETNNIPCKTNPMGVKGAGEAGAIGSCPAVVNAIIDALWREYKIDHIDMPATPERVWIAIHEHHRRHSL

SEQ ID NO: 15412 - protein, 52 aa, BradyrhizobiumColbertium
MDRNPRAPSPSQPVIPNQTRKVRDTIFDSDPMRDDPPPRFGWNEICRAVLVH

SEQ ID NO: 15413 - protein, 151 aa, BradyrhizobiumColbertium
MFRMKRVLVVGGALLLGMGAVWAQQDSVKEVQSLMKGNGKNAGAMSAMVKGEKPYDQATVDSALAQFEDTAKKLPNLFPASAKGVKLDGDYSTSPKVWEDRAGFDAKIASFAKVVGEAKTKIKDLDSLKATMPAIGRECGGCHETYRIKNG

SEQ ID NO: 15414 - protein, 374 aa, BradyrhizobiumColbertium
MAKPFPSKTHIGNHMLHPETLMLTYGYDPQLSEGAIKPPVFLTSTFVFKTAEDGQDFFDYVAGRREPPEGMGAGLVYSRFNHPNSEIVEDRLAIYERTESCALFSSGMAAIATTILAFVRPGDVILHSQPLYGGTETLLTNTLARLSIGAVGFADGIDEAAVKQASEDAMGKGRVSMILIETPANPTNGLVDIAMIRRVADAIGKAQGHTPIIACDNTLLGPVFQRPIEHGADLSLYSLTKYVGGHSDLIAGAALGSKAIMKGVKALRGAIGTQLDPHSCWMINRSLETLSLRMEKANVNARLVADFLREHPKVAKVHYLGHHEEGSPAGRVFTRQCLGAGSTFSFDIAGGKEAAVKFLNALQILKLAVSLGGT

SEQ ID NO: 15415 - protein, 44 aa, BradyrhizobiumColbertium
MTHSGVPADIRRKIGVLDSTIRLSIGIENASDLIADLTQALNAA

SEQ ID NO: 15416 - protein, 41 aa, BradyrhizobiumColbertium
MSAIERAQRAVSFVTFSAPNPFGPPSKRPYFSLFPFPARAS

SEQ ID NO: 15417 - protein, 308 aa, BradyrhizobiumColbertium
MLQRTILVVLLAAIAAAGVYWWLSAPVVAAASATPSRTPDLANGEVMFNAGGCASCHAVPNQPDRLRLGGGVSIKSPFGTFHAPNISPDPNDGIGKWTEADFVNAVMYGVSPSGQHYFPSFPYTSYQHARREDVLDLFAYLKTLPAVAGKVRDHDLGFPFHIRRNVGIWKRLFMDDRPFVADGSKSPQWNRGAYLVNSFGHCAECHSPRNALGGIIASQRFAGGPNPEGEGWVPNITQKRLGEWSVKDLAYFLKTGELPDGDSVGGSMTRVIKNTSQLPEADLAAMAEYLKSLSPAEGPPRPARKEGS

SEQ ID NO: 15418 - protein, 81 aa, BradyrhizobiumColbertium
MVPFFVQIKCKLGQSYTVANALAEAEIASEIYSTAGQYDLLVKFYVDKDTDIGHFVNEKVQVLPGIQDTLTIITFKAFGTG

SEQ ID NO: 15419 - protein, 659 aa, BradyrhizobiumColbertium
MWAFFERLLDSSMLSPHGICLLWDPELIWLHVVSDACIAAAYFSIPFALAILVIKRRDLKFGWVYWAFAIFIMACGLSHVLSIYTLWVPVYGVEGMVKAATAVASVFTAAALWPLLPRVLTIPSPFELRQVKAALEEEEIKSRDAALLLQQVSDAQRALRASVARLTAIVETAVDGVILFDAHDRILLFNPACERLFGYRADEVMNRNVSMLMPEAEATPDSRARHFATGGEAIARRKDGSTFPMDLSVGQARQDGELIFVGIVHDLTARKLTEQQLQQAQKMETVGQLSGGIAHDFNNLLTVIIGNAEHLGEQLKERPELRRFADDICQSGERGAELTQRLLAFSRRQLLQPQSIDCRSLLDSMFKLLKRTLRENIEIRTTSGHGTVLAFADRSQLESAVLNLALNAQDAMPSGGHLTLSTELAAIDDDYRALHPEVVPGSYALISVADDGEGMTPDVIERAFEPFFTTKEVGKGSGLGLSMVYGFAKQSGGHVSIYSEAGLGTTVRIYLPRASTGQSHVDLPEGEDTAPRGYETILIVEDDPFVRSSVIRRVEALGYRVVAAVNGKDALQQLRSDPSIDLLFTDIVMPGGMSGWELADQARRVRPGLPVLFTSGYALETLVEQGRAQAQAIVLTKPYRKVELAQRLRDALVVAAVAT

SEQ ID NO: 15420 - protein, 270 aa, BradyrhizobiumColbertium
MYPAMTTPVALTIAGSDSSGGAGIQADLKTFAALGVYGASVITALTAQNTRGVSGIHAVPADFVTAQIDAVFADLEIGAVKIGMVAQVASIDAIAAALSRLAPRHVVLDPVMVATSGDRLLAAEAVDALRTGLIPLASVITPNLPEAAALLDEVVATSEAEIESQGRRLLALGCRAVLIKGGHGEGAESIDYLVDANNTIALAAPRVATRNTHGTGCSLSSAIAAGLAKGEDLERAVRNAKSWISAAIEAADRFSVGHGHGPVHHFHRFY

SEQ ID NO: 15421 - protein, 265 aa, BradyrhizobiumColbertium
MSDESQERRFRTLFISDVHLGARGSQADLLLDFLRYHDADTIYLVGDIVDGWALKSSWHWPQSHNDLVQKLLRKARKGAKVIYIPGNHDEFLRNYYGTHFGGIDVVENTVHTGVDGKRYLVIHGDIFDLVVQNARWLAHLGDRAYDFAIQMNRLVNFFRRLFGVPYWSLSQWAKQKVKNAVNYIGAFEQALAAEARRYDADGVICGHIHYAVIRDEAGIRYMNCGDWVESCTALVEHDDGHFEIITWADHLQRPAVVPQVAARAA

SEQ ID NO: 15422 - protein, 348 aa, BradyrhizobiumColbertium
MMRILVATDAWHPQVNGVVRTLTKLADAARGLDVDFTFLTPQSFRTFAMPSYRDVRLAMPRPARIAKLIEEARPDSIHIATEGPIGLMVRRYCRQRKLPFTTSFHTRFPEYVRARVPVPGSLIWRALRRFHEPSRAVMAATPALARELSERGFENVVLWPRGVDTGLFHPRAVDLCLPAPVFLSVGRVAVEKNLEAFLDLDLPGTKVVVGDGPARGSLEEAYPDAIFLGEKHGEDLADIYAAADVFVFPSKTDTFGLVLLEALASGLPVAAFPVKGPRDVIGDAPVGALDHDLRNACFAALEISRQDCVEFAAKYTWEVSARVFIDSIQAVGAVLPGRSDAERPRFVA

SEQ ID NO: 15423 - protein, 190 aa, BradyrhizobiumColbertium
MTEQLLPIGPADIDAAARVIAPYAIRTPLLSFPVLNERVGAKVFLKPEMLQRTGSFKFRGAFNKVFSIPHDKRAGGVVAFSSGNHAQGVAAAAKILEMQATIVMPADAPLSKRERTKSYGAEVVLYDRDRDDREAISRGIAEKRGATLVKPYDDPFVIAGQGTAGREIAEDMAPSASAPTSWWRRPPAAA

SEQ ID NO: 15424 - protein, 145 aa, BradyrhizobiumColbertium
MAPASGGGLIAGVATAVKARYPQAEIVVAEPESFDDHGISLTAGHREPHPPAGRTICDALMALMPGEMTFAINSKLLARGVTASDKEVGAAVAFAYRELKLVVEPGGAVGLAALLAGRLDVSGKNVVIVLSGGNVDADLFAELVA

SEQ ID NO: 15425 - protein, 607 aa, BradyrhizobiumColbertium
MFRLKLFLTTVSLMGSLFGFAWGPVSAQVAPVQPAPTAVQGPEQRVALVIGNANYQNAPQLANPDDDAQSMAQFLNSAGFEVVAATDLTQNDMLRVVQDFSAKVASRGPNTVAMVYYAGHGVQLAGENYLVPVDAKVSNPTDLVNNSVRLVDVMSTLETIPSRMRIVILDACRNNPFPEVNDAGRGLAIVDAPNGSIVGYSTAPGAEALDGTGGHSPYTQAFLNVAREPNVPIEQLFKRVRLQVNQTTSGAQIPWESSSLTSDFTFFGDTAVAANRAPVKAPVVQMASNLPSRSTRQAYDYVVSEGRPEYYQEFIRMYPHDPLCDHVRWLLNNILISQAWHKAVLANSPVAYKSFYDSYGNSPYAQIALKLQAQPKQIPLMQATKFLAPQSIAPTFKIGNLGQPKYMPLMQQGNGGAQMGGNLPLVQKPVDGSVIAKPGNGGPIVGLPSGNNQPNQHNGAPTQTPGKIVTLPAPTNTTNGKVGIGKILTLPATNNPHGGNKTGNANGTTNGSPGKIATMPVHGGKGGTKIDVRPVRTQNHPIRINNGNTGIVKPNNNPVSKVQVLNNRPQLNTMPSRMVSSNNNFRQSMNQAPSMSGGSNRRGGFMR

SEQ ID NO: 15426 - protein, 147 aa, BradyrhizobiumColbertium
MLKSIDPVLTPDLLWLLAAMGHGDDLAVVDANHPAARIAQSTSSQRLIQLPGLQMETAVRAIMTLFPLDDFDPDPVRVMMPVDDPERVPEVQRAVLAEIERGAGRAVAPGKLSRTDFYRAAAAAFGVVQVGDSRGYGCFLIRKGVIS

SEQ ID NO: 15427 - protein, 127 aa, BradyrhizobiumColbertium
MSELPRVGAFAIIPNNDLPAAIPFWERLGFARTGGDAGYVIMSGWGCEVHLTQAGDGPWRVPQHNPFGIFIRTPDVEAIAARVEDLIIRPGGVLRHREWGMYEVGINGPDGLLVRIGWPSELMRRAS

SEQ ID NO: 15428 - protein, 115 aa, BradyrhizobiumColbertium
MCLFVAVILSLLPAVAPAEPAQKRPKPVWKGYGFLPGYRQPLSNSIPLYKQKDAMRRMSRADRRHWYIDPVPQYYRWNGEWHYFGRPGFNGGRYNGGSFGPCWTRTPIGPIWNCG

SEQ ID NO: 15429 - protein, 474 aa, BradyrhizobiumColbertium
MANEAFALSPMSARAAEPNEQDYDAIREAFMETARGRWFLGEYAKRNRNADTRMVLDAVAKIEETLAAQRQPVVEDRLPEALVEIRRAIGEAETIAIAASNPAAIEASLAPIPRGVRIIKEISWRWREIGADGRICDLIDSQLASIEAACGQLSTIDPRLELKAAFDLLRDRVEQLGGDATPQAASSARAPEQEPPSSIAESAPVETAPVAMASEAPVAFTEMQEEIAAAPDVEAAGVAETAAVADQATDAAVAPEIVAESQLGLARAAMDNVAPDGAALEDASLEEPAIEPPAVLTEAIDAVAFDAAAEAEDEAILDAIALEMAAPDPDFDEIIEPVEMVAPTPEPIAAEVATPVAAALPEPIAPEPVVAAAAEEPADAPIAMKSLARLTDAIAEAAAEMEQPAPAMAAAASFAAAPTATLPMPSPLPASLPEPSLGATILASGILQKPRAPANDPLAPIRRMTQAEKIAFFS

SEQ ID NO: 15430 - protein, 380 aa, BradyrhizobiumColbertium
MSLAVFYSAFFAVLGTHMPFFPVWLKAIGIDAAWIGLINALPAITRFTTLPQVTAFAEKRHAIRAGIMVSVLATAVGFSVVGLQQQPLALFLIYALTCMMWTPTMPLTDAYALRGVARYGLDYGPLRLWGSAAFAAGSLACGYLVDLIAPRDLIWVIVAWAVVAVLASLLLQPLDDPGRRAPERHAGKALLRDAAFWAVIASAALIQSSHIAFYTFSAINWQLQGLSGLTIATLWTLGVLAEIVVFALSPRFSLQPSTLMAVGGLSAVVRWIVTASEPPLALLAIAQLGHGFSFGMTILGTMSLLVQRVPSHQIARGQGYYAACNGLLGAATSIASGAIYAHIGDSVYYVMAAMAAAGALLIWSARHRLKAQPHSEASGG

SEQ ID NO: 15431 - protein, 331 aa, BradyrhizobiumColbertium
MTSTKFHGLAVRIERFPIAGSFTISRGAKTEAVTVVAEVSQDRLTGRGECVPYPRYGETPEATLAAIQAMQQAVAGGLTREALQAAMPAGAARNALDCALIDLEAKSAGLRAWNLLGRPEPRERTTAYTISLGTPEAMAAATAQAAHRPLLKIKLGGDGDPERIAAVRKAAPESELIVDANEAWSETNLERNLAACAEAGVTLVEQPLPSGKDEALARIKRPLAVCADESVHDRSSLAPLRERYDAVNIKLDKTGGLTEALAMADAARALGFEIMIGCMVATSLSMAPAMLVTPHARFVDLDGPLLLARDRDHGLRYDGSLVYPPDASLWG

SEQ ID NO: 15432 - protein, 377 aa, BradyrhizobiumColbertium
MSSDPKLERIAKGNALALCATGTWTASFAPVLERMVADAEKLAGTPQSIFIDVSEVAKLDTFGAWLIERLRRSLTQGAVEAQIAGLSANYSSLVDEVRRVRATPVVDSSPITISGMLEQIGRTVAGIAGTVAGLVDMLGAVLAAGFRVLVHPRSFRLTSTVHHMEQVCWRAVPIIVLITFLIGCIIAQQGIFHFRRFGADIFVVDMLGVLVLREIGVLLVAIMVAGRSGSAYTAELGSMKMREEIDALRTMGFDPIEVLVLPRMMALVLALPILAFLGAMAALYGGGLVAWLYGGVQPEAFLLRLRDAISIDHFIVGIVKAPVMAAVIGIVACVEGLAVQGSAESLGQHTTASVVKGIFFVIVMDGIFAIFFASIGM

SEQ ID NO: 15433 - protein, 146 aa, BradyrhizobiumColbertium
MREYLRVSQRLMDEITMAKLAMVGLKPEVAERFPSELSGGMIKRVALARALSLDPDLVFLDEPTSGLDPIGAGDFDELVRTLQRTLGLTVFMVTHDLDSLYTACDRIAVLGNGKIIAAGSIADMQASQHPWLRQYFHGKRARAVMS

SEQ ID NO: 15434 - protein, 286 aa, BradyrhizobiumColbertium
METRANYILIGSFTLAVIAAAIGFVLWFQSLHTTKQRSPLRVVFEGPAAGLRNGGSVNFNGIRVGEVVSVKLDNPRRVVALAMIENNAPIRKDTLVGLEFQGLTGVAAISLKGGDEAAPPPPLDQDGIPMLTADPNKLQDVTEAIRGTLQNINKIVADNQESVKNSLKNLETFTNSLARNSEKIDGVMAKVDGVMLKADNLMLGLNTLAGGKDGGELFQAVKSIRELAEDFDKRSGALMADGRRTLGDISRAVNNFDRNPTRVLFGASNSSQPAPPPEPPKPVPRR

SEQ ID NO: 15435 - protein, 1900 aa, BradyrhizobiumColbertium
MANTPKKVKDPTEVALSAIQEALNISDTAADTSRNATMRNEAAPAVPPVPPVFDEPSFEPRPAANERSTVFDAVEEPLSSRRPANDDRETIGQLLQALQKGRPARSVYTFATIFAGVWLAACAALTIGFLPSIQTAMGQSGGVLVIAGLIAMVLAPIMLFYFLASLVWRGQEMRMIAQAMAQVAIRFSEPEGSASDSMVTVGQAIRREVAAMGDGIERAIARAGELETLVANEVAALERAYSDNEVRIRDRLQDIAHQRDNLVGQAEQVRSAISGVQIDLRHDIALISDAIASRVDEVAKSITGALEERGAHITQALSNAGDNMILALGERGGDLLDRLEEASNETTRAVLDASERLTTSLNFKTGHVHDEFVDLADRVHEMLNERIDRITGEFEQRSAAIVDGISERTEQVHDSLKNSSDSLLLELELRSNDISAKIDDAGNRLAGQIMTSGDKASEALDATVNALVAKVVSQTETAHDSLSLQMSAFDELVRNQGTELVEKFARDSGTLGALITRHISEFDRTVKTFGGEIVERMGQRTQDIAETLKTYVDNFDSRFTSNGGEITAVLDQRLVQFETTIGERVSNLDASLNGKIASLDGTIEGHIRTFDEQLVGRVAAIEHSFDTRAKSMTETIDGRINTLATSLTDGAAQAIQSIDSRLTHLTTTLTGGASQAIETIDARLNLLTSSLTDGASQTIQSIDTRLTHLTTTLTGGATQALESIDSRLTYLTTAVTNGASQAVQSIDTRLTLLTSTLTDGTAQAIEAVDRRITGVTEIIDGRSMHLTDTVTARFQEIQQAIETKVGSVASDIDVRVAQFEDLLGSRVEAVAGRIESSGRQASEDMMSRAEMISTAIRSHVEDAERSLTNLVVNTSETIQTGARTAQQSLLTVSSDVNAQLKMTSAEVEQALTAVGTGAANSILTSAREAQSTLVAASGEASSQIKGLAADVERTLSAAGSATAASILAGAREVQTTLVTASSDAANQVKTLTADVQRSLSMAGTATAESITAGARDAQSALIAASTETANQIKALSSDVQRSLTMAGTSTAETIMSGAREAQSTLVTASSDAASQVKSLAAEVHRSLSQVGQSTAETITSSARDAQSTLLAVSAEQTNQVRSLAAEMQRALATAGGATIEALTSGVREAQTSLVSASTDAATQIKSLTTDIERTLTAVGADTASTILNSAREAQISLTSTSADAASQIRSISTEIERTLSAATANATNDIQTSALNAQNALISASNEASSRVKSSSADVERSVLAASSSFGQAMTGKTDEIVTYVTQQADRLSNMIDAKRGALVDAIGSKASQLTLDIDRVTSDALKSIETRGQAFSQTMMGNGSEVARTINAASEIATTAVGKSLKDLEQASRSAIDQSRQVSIAAVTEMQETSKILRTDTVALFERLREGNILLQEVLTGAHDNLNSLERALVTRVADFVSAMNDVTSRNGAATQNLEEQLNVFNSKTTKALQDLGELSTQFDKHGQALVEAAQVVEQSNKNTTASLAERKQALESLVTTIDLRTADLDQRLSRFTGLLDESLAAAEERARDIARVVAETAGAGSAAITRQFEAVRAASEEEHRQTIETMHDIYRQTTDEADAMFKQSTEKFTNLVASMKQMALEMHNELEATRNELRRGVLEMPQEAAESTAQMRKVIVDQIEALAELNRIVAQHGRGLDVTTAGRAGVHRQEEPVLAAVGGRPPETRTRDTGSASTLPPPDLGMPAPRRTEAPPVAPASNDQGRDGWLSDLLNRTDAHQGAPAGREAPRGRAAPAPQPQAPQGGGNPLESLSLDIGRLMDRNLAAEMWDRYQRGENKAFTKRLYTPAGQKAFDEVARKYRADRNFKGTVDRYVVEFERLLDEVARDGRGPQELRTHLISETGLVYTLLAHAAGRLG

SEQ ID NO: 15436 - protein, 117 aa, BradyrhizobiumColbertium
MDWMPSPPLAPIESPLDLDHLSRMTLGDTELEQEVLAMFAEQAVRLLAAMTSVPAETGALAHKLKGSARGIGAFAVADAAASLETAVRTGHGRPHALAALKEAVTEARAAIEAILKP

SEQ ID NO: 15437 - protein, 106 aa, BradyrhizobiumColbertium
MAKIHFVDHKGETRTVEIENGATVMEAAIRNSIPGIEAECGGACACATCHVYVDEAWREKVGSPTPMEEDMLDFGFDVRPNSRLSCQIKVSDELDGLVVATPERQA

SEQ ID NO: 15438 - protein, 163 aa, BradyrhizobiumColbertium
MRYDGDQSVNAPSRLDTTPRLEDYPYRLSDNVRFGDLDPNQHVNNAVYATYFETGRVTLMKLPEYGLTPPGLAWIMVRLDIHFRAELHWPNTIELGLGVVKLGRTSVTFEQVVFSEGKCIASATSVGVMIDEATRRPTPLTAEVIEKLRPWHKRGIEVAPPSI

SEQ ID NO: 15439 - protein, 342 aa, BradyrhizobiumColbertium
MSDAIKTDVLIIGAGPCGLFAAFELGLLDMKAHFVDILDKVGGQCAELYPEKPIYDIPGIPQVSGQGLTDALMEQIKPFHPTFHLGEMVETVEKIGDPAFRCTTDAGKVFECKVVVIAAGGGSFQPKRPPVPGIEAYEGTSVHYAVRKMETFRDKNVLIVGGGDSALDWTLNLHPIAKRITLLHRRDEFRAAPHSVEQMRALVAGGKMDLRLGQVTALSGADGKLTGATVKGNDNSITEIACDTMLPFFGLTMKLGPVANWGIALENNLVPVETSAFETNVPGIFAIGDINTYPGKIKLILCGFHEGALMSQKAHRYVYPEKRLVFQYTTSSSSLQKKLGVN

SEQ ID NO: 15440 - protein, 201 aa, BradyrhizobiumColbertium
MMTMRTLVFSFRLLSFLALAFPLAAVTPSAAQTAEPTAAGLWQKVEDGKTVGWFLFVDRNGVFEGVIAKTFPRPTDDPNEVCSKCTDDRKNAPVLGISFVRNMKREGLKYEGGNVLNPRDGQIWKANMKVSPDGQTLTLRGYLGISLLGKDETWTRLPDAYIAQVDPAIVAKYLPAQAAAAKQPSPAPKKGGAMMAPAPKQ

SEQ ID NO: 15441 - protein, 89 aa, BradyrhizobiumColbertium
MRVLSMIAVAGAMIASSAGAFATELPSYEVTSFPITATQVQVLGGAGVEEQSASPTMIVAGMPASPAQVAVLSPRAKRLASAGSDSKAR

SEQ ID NO: 15442 - protein, 37 aa, BradyrhizobiumColbertium
MEISVDNVNPRFGRLDAGTGSLVREHSCVRERTYLIA

SEQ ID NO: 15443 - protein, 221 aa, BradyrhizobiumColbertium
MDQDVAAKEQPRYIRLNERDNVAIVVNDFGLPAGSRFACGLTLRAFVPQGHKAALVDIAEGAPIVRYGEIIGYALSPILAGEWVDEARIRMPEAPALDKLEISTAVPAPLPPLEGFTFEGYRNPDGSVGTKNILGISSSVQCVKPARTRRSAAKPTAGFAVTPENASLPPHCSPMTRSEAGQVSRLRALSTFSRASAWVMIALALPPARRPSRNAAGTCSA

SEQ ID NO: 15444 - protein, 482 aa, BradyrhizobiumColbertium
MTAILKNFIGGEWVDGSGITRNINPSNTNDLVGEYAKADKAQTEKAIAAAKAAFPAWSRSTPQERYDALNKISIEILSRKEELGRLLAREEGKTLPEGIGEVGRAGQIFAFFAGEALRLIGEKGASVRPGIDVELTREPVGVVGMITPWNFPIAIPAWKIAPALCYGNTVVFKPAELVPGSAHALSEIITRSGIPAGVFNLVVGSGSVVGQTLLEHPDVAAISFTGSVQTGRKIAQACVLSNPMKKFQLEMGGKNPLVVLDDADLKTAVEVAVNGAYFSTGQRCTASSRLIVTEGIHDRFVAAVAERLNSLSVDDALKAGVHIGPVVDQNQLDQDLRYIKIGQDEGARLAFGGELLKRDNPGHYLQPALFTEANNNMRIAREEIFGPVAAVIRAKNYEEALAISNDTEFGLASGICTTSLKYASHYKRNSESGMVMVNLPTAGVDYHVPFGGRKGSSYGAREQGSYAREFYTTVKTAYTFPG

SEQ ID NO: 15445 - protein, 628 aa, BradyrhizobiumColbertium
MPPGRAAAQDAGAMQINWEVRNRFRLFREERDFLLHVENARDRSILAAEQSLELQSEGRGWARNAVNRLCIDLQGRVNQPCTRDNVKENYITPIDHPVTVRLTGAVPVGATCAWSFDDGDGPQQSTFDCAEPINLRVRYGKQTVATVDVSSGSDPTQRIQTEIQVRDIFIAGLGDSIASGEGNPDRPLALADEGFCFRSYLGTAGAQYYRPSRQGFKGGRACEAPDTLANWQRYSALWFNAPCHRSLYSYQARTALALALRYTHIAVTFLPLACTGASISDGLLGSQRARECAPGKTGVCNTSVNAQVAELREALAAAKKRQPDRTLDLVLLSVGANDVYFSGLVADVIVDTATERALFRRSGVMATVDDSRDALVRELPQKFARLREALKPLVGGDLSRVVYVSYANPALADGGVPCRGGRAGFDIHPSFNADPQRLARVSTFVDTEFLPQLKGLATCSRGALCRDPEADRMTFVDAHQAAFADHGFCAHSGNDPEFDRTCFAENGQSFNPDIVSAASQPMLCGRGASEYRAYLPRARWIRDANDSYFAAMTYPQGLPAASQPTDIHDATWGVLSAVYGGAVHPSAEGHAAMADAALPAASAVLGLDAVPPSVTRGFLPQLLPGTQQ

SEQ ID NO: 15446 - protein, 360 aa, BradyrhizobiumColbertium
MHGLLTALQRGFKRWIGWRRLGIAASILIIAFAITTLVRTLKGIDTAVILTALTEIPRGNIGLAAICVFFAFCTLTFYDYFALRTIGKKHVPYRIAALSSFTSYSIGHNIGATVFTGGAIRFRIYSDYGLNAIDVAKICFLSGLTFWLGNIFVLSIGMAIHPDAASSMDQLPASINRLIALGGLASIGAYLVWLCMGEKRRELGQKGWKVVLPSASLTLVQILIGVVDLGFCAMAMYLLMPANPPIDFMSLAVVFILATLIGFASHAPGSIGVFDAAMLVALPQFGREELLATLLVFRILYFVVPFGLAISIMGTRELWMNVVAPWQERRRLAEACAQANLPKQVAAMERERTLRRAGKR

SEQ ID NO: 15447 - protein, 37 aa, BradyrhizobiumColbertium
MHSSSRRGQRPTGPGIGQSGSITAKGRHRSLGMIQLI

SEQ ID NO: 15448 - protein, 204 aa, BradyrhizobiumColbertium
MLRTRWARSAIEHGEISGFLLQARAVVFPKPERIGTMGLFTKDIKTMNDLFVHQLQDIYYAEQQLTKALPKMASKATDPQLKQGFLTHLEETRQHVARLEEVFKMHGVAAKAVDCPAIDGIIEEADETAGEVADKAVLDAALINAAQAAEHYEIVRYGSLIAWAKQLGRSDCAAVLAKTLEEEKATDKKLTTLAESKVNLRAAS

SEQ ID NO: 15449 - protein, 154 aa, BradyrhizobiumColbertium
MAETTFFPRRLILGAAMISGVLLALAVHMLGARYGLDLGGLWRGDTREFIPAGAAIAWWLIATVGISGGYFTASLMQSAVSGQIPQRMRQFLIAVGVLLLAGAGQAASAPSPIPTVSGVLAGLAALCLGAVMAFCGAHFALRRADGLRRPMRPR

SEQ ID NO: 15450 - protein, 193 aa, BradyrhizobiumColbertium
MLGSEAAPATSYAYKASLIGSAHRFELTEEGLSWHIAGRQGLWRYDEISAIRLSFRPVSMQQHRFRADVTHASGRRIAILSTSWQTAALMSTQDSGFRAFIVELHARMAKAGSRAVLTAGLGRITHAAVLACLAVLTVAMAGLLIRALVIGEFAGALFILGFAALFAWQVGGFVRRNQPRSYTLARLPQALLP

SEQ ID NO: 15451 - protein, 196 aa, BradyrhizobiumColbertium
MDPTTRPLAADEIAEINRRHLIETPLVPADLLFVFGTREDDMLRADTAARLWREGYFRWSIVSGGVTPGSEQSECTLIKTAMVNAGVPAELVLEEHRAMNTGENVIFSLPIIDAALGLANIRNVICLGNTWTARRYPMTLHRHWPEVEKMLLTVDSFATPRALWHTDAEFRRRMLHEWDKIEPYKAKGFIAEWPEA

SEQ ID NO: 15452 - protein, 447 aa, BradyrhizobiumColbertium
MSKFEYVKLADAIAADITNGTLRPGDRLPPQRDFAYDRGIAVSTASRVYTELLRRGLVVGEVGRGTFISGDIRREVGTMSEPAEARINFEVNYPLLPQQWAMIAKSLAGLERVDALESALRVSTSTGTRSARTAAAAYLARKDFTPQPEQVFFTANGKQSLAAALAALVPTGGRCGVEALTYPYVKSIAARLGVTLVPIPMDGFGARPDAIQKAHREAHLSALYLQPIIQNPLGVTMNATRRADIMRVAEKLDLTIIEDAVYGFLADDTPLAALDPERCIVIDSLSKKVAPGLALGILVAPAHLRESVMSAIRTGGWIASGHALAAGQRLMADGTVAELTRLKRIDAARRQQTASRLLAGYQLAADTRSYHLWLTLPPHWRSQTFVAAAARRGIALTPSSTFAIAHGHAPNAVRLALAPPSPEQLDSGLRTIASLLGTKEEDFDSTE

SEQ ID NO: 15453 - protein, 37 aa, BradyrhizobiumColbertium
MAEESESNPTADEVQAPTASAPTAQLRRAGRQAGEER

SEQ ID NO: 15454 - protein, 78 aa, BradyrhizobiumColbertium
MTTISQTAGRSLRPSSSGGFLGALAHGVSALFDRLERRSAVKTLNELDDRALRDIGITRSQIEDAVYGQFKDELSRYL

SEQ ID NO: 15455 - protein, 141 aa, BradyrhizobiumColbertium
MFKSILVPIDLADTDLAKPAIATAATLSQTWSGTVRLLNVLPMTPVMLAEYVPADFDEQQRETSEEALAIVARESGIDPARISTVVRQGGIYHEILEEAAQMKADLIVMTSHRPAMRTYFLGSNAGHVVRYAKCSVLVVRH

SEQ ID NO: 15456 - protein, 178 aa, BradyrhizobiumColbertium
MRRLMLLRHAKTETDAPSGRDQDRRLDERGHKDAARIGAWIATHPPFPETVLVSHAVRARQTWDIAWEAMKDRVPAPQVEILPELYGADPAEILDTIRTATAPADPKQLLLIGHNPGMHEIALMLTGGGDPDGAKALGDNLPTAGLAIFDFDVKDWADVAYRRGRLVLFVSPKLLRSG

SEQ ID NO: 15457 - protein, 482 aa, BradyrhizobiumColbertium
MPQEGAGLRDRERLSFDLDTDICVVGAGLAGLSIALEAARLGASVAVLEGRQVGWNASGNQLGTVMPGFALPLTDLIERIGFEDARELWMLSKEGAEFVRANATEENMPGIGPSDGVLEVSNIDAGDRLISRLQMLNEDFDTEVEGWQAERVRDVLKTDRYFHGVYYPKAFQVDGRKYVHGLAALARRAGARIFEDTPVVSIDHSGIRKRIVTPSARLRASHIVLAGNVHLGAPLKRLSETLLPVWRYAGITAPLGERLHEVIAFKGSVMDSDGIDHFRIVEGDRLLWESPETTWAASPERFAGAVRRRIRTIFPELGNVEITQMFGGATGQTVHGMPQIGQLRKGLWVVSGFGRQGMNTSAMAGQMIARSILWGDERWKLFSPFELVWAGGATGRVAGQLVGMWGRASSAATGSLARYRERARARDRDREARLAQANRAAGTGPRRPPPGVEPRPTSRLTPAAHDAEQAMEPVSHDAGVSR

SEQ ID NO: 15458 - protein, 170 aa, BradyrhizobiumColbertium
MFDRRILLTTAAGLLGLSAFRWLRASPAEAGEKAAQKFEITKTEAEWRAQLTPQQYEILRNHGTERPGSSPLLKEHRKGIFACAGCDLPLFSSETKFESGTGWPSFYAPIEGNVGKTVDRTYGMVRTEVHCRRCGGHLGHVFDDGPKPTGLRYCIDGFGLVFHPAAASAT

SEQ ID NO: 15459 - protein, 750 aa, BradyrhizobiumColbertium
MGIFDAMNTSVGGLQAQSFALQNISGNIANSSTTGYKGIGTSFVDLIPDSSVPSKQVAGGVQANAKATITTQGTISSSTVATNMAITGDGFFSIQKASGVVDNVPVFTGVTYYTRRGDFQLNANGNLVNGAGYYLMGVTVDPKTGNPTGSVANVLQFQNNFIPAQATTSIQYAANLPTQPNTVAKTTASTGTLLAAGGLNPSDFAANPLPVGTPPAPYANATVSGAAATGNIRSAYSSTTATGTVALQNNSSAVASTTTSLDNAAGTHLASSILTALSGQTLTINGNTITFDGGTTVSTVGSNTTIGLGAGTTATVADILNAIQTAGGAGVTASLSVSGNIQISSGTGTDVAIGSGTAATALGISSVTRGGNVLSSPAISGATVLSGTATAGGAQVLTSGFSAGDTITVNGQTLTFMNSGASGPNQINVTDNVTTLLGKIDALSGASGSSVSSGGVITLNTGTVSNLTVSSSNSAAFSALGFTSTITRNRDGGGTAGTGGVIGNDIATFTKESISGGAVTAYNAAGTPVNLQLRWAKTDSASLGAGHSDSWNLFYQTDPNATGTTVGWVNTGQTFTFAADGSLTSPSGSGITINNVTVSGQSLGSVAFNISSGGLTQYASTSGAVTINTITQNGYAAGQLRSVAVNNNGVVVGTFSNGQNLNLAQVQLSHFNGTNYLKAMDGGAYAATEQSGDAIDGASGTISGSSLEGSNTDIADEFTKLIVTQQAYSANTKVITTANSMVQDLLNVLR

SEQ ID NO: 15460 - protein, 344 aa, BradyrhizobiumColbertium
MVSSGQIAADLKLRDQILVQAQNQIDELAATMASALSDKTTAGSTVSGPPTGFDLELAGALPGNTVNITYTDTATNTQRQITLVNVTDPAALPLQNPTNANPMRIGVNFSGGMGAIASALNTALSGTHLSFSAAPSPATATTLRLTDDNTGLAKVSSASTTKTISSLTSGNPQLPLFTDGGQALYTGAFTASGSQMTGLAGRIAVNTQLVSDPTRMSVYSTSPVTPAGDTTRSDYLYSQLTNAVFSYSPQSGLGSASQPFTGSVSNFLQQFLSVQANAATQSTQLQEGQSVVVSTLQAKFDSTSSVNLDAEMSNLIQLQNAYAANAHVMSVVQSMMNTLLQAQV

SEQ ID NO: 15461 - protein, 627 aa, BradyrhizobiumColbertium
MSISSINYSSSVLGAQIRNINQQLTDLSTQLSTGKLSQNYAGMGTNEGFAIAGRAQLSNIAAYTDTITNVNVSINLANTALQSLTKIRSTVQTGSASTAQDLNVNGQTIAQNTAAAQFGSMVGVLNTQTGSRYLFSGTAVNTQSVADAGDIINGTTTQAGFKTVMAERQAADLGANGMGRLVQTQPTPSSVQVSEDVAGSPFGLKIKAVSSTLTGATVTGPSGSPVSFSVDLNGVNPNNGDKLSIQFTLPDGTTEQIDLTASSATPTPLGSFAIDASTPVNPNNTAANLNTALNTAIAKLANTSLVAASAIVAGDNFFNTASSAIGTPVNNQAAPPAPIAGATALSGPSPSDSISPGFVAGDTITVNGTTLTFVSSGATGNQLNVTDNVQTMLSKIDQITGTSKPSTVHGGSITINTDDAASLSITTSNTGALNALGFGSTPVTATQPPLRVGSSPANSATTLVNGSANTVKWYLGNDGPGSPRSTAIARVDDAVTVQYGAQANEDAIRRQLQAIAVFGTFSTSPTGQYSGGQVAALSLRVTQALTQQPGQQRIEDIQTDIAMAQNTMNDATTRQTQAKAQLQTIIDQAESASPDQVASEILALQNALQASYQVTSNLAQLSLVKFL

SEQ ID NO: 15462 - protein, 41 aa, BradyrhizobiumColbertium
MLDTCPPKHGVATTNCILSDIVSPAPLQSSPRGKEAWLTTP

SEQ ID NO: 15463 - protein, 253 aa, BradyrhizobiumColbertium
MATPCFGGQVSSIYASSIFALQRAVHGMSNLELKVHLRDGDALITRARANLVALFLDDPRATHFLFIDADIGFKPEQVFRLIECGADVVAGCYPIKRVNWDKARRAMAAGRTDVPAASLDYVLEIEDPDRIVVVNGFTRVRYAGTGFLMIRRHVLEAMCRHPAYAGLQFFREHSHDALAASQNRFALFECMIDPATGTYLSEDFAFCKRWTDIGGEIWADIQSSLDHVGPSVFHGDIASQFAAVPAAAAADAA

SEQ ID NO: 15464 - protein, 542 aa, BradyrhizobiumColbertium
MSGGASRLSEAERASDGGSRYRLRDLFTPLDMLLVSGGDPRLALDPKDSTNAYGCAVSPDPDVWEFASSTASTISQAAYDRAALARDELMHKCLFDEVEVAFDARCEEMRDELRGHLELSPRVDVVFSPSGTDSQLHALFLARAILGARPVTIVVGAEQTGSGTTHTARGHHFSSMTASGVAVRKDGAVAGLAGASIALPLREAASGIAMRADADAAVLQAIEATIAQGAPVLLQIMDCSKLGWRAPSAACLDEIARRWPRKVQIVVDACQARLGRRRLRAYLDRGYMVLITGSKFFGGPAFSGALLVPKDPARSLDRVEGIAPGFLDYAGRCDWPIAWAELRSRFERRPNFGQWLRWEAALAEIGSYYTVPGAFRAAMLAELAAGIGSMIRLSPSFRAVPTAAATAGMEDEEFAHATIFPFTLLRNGQPVSTAEMASVHHALACDVIAAIGGSAADREVAAQRCLIGRPVRLERQDEAPQAVLRLCVGARFVTEAWSPDARESQRNVQRLLDRIAHVLVKIELLLDRGGVAAVPAAPAFEV

SEQ ID NO: 15465 - protein, 417 aa, BradyrhizobiumColbertium
MQHPVSAPIGLTAANYADRIGFAQLTRRAFEGVDLHPLRDQLVARIAAGTALAGEALDLSLISQLLGDKDQGLAIQSEVLAFHQLFRTPSAAPKPGLRVLALAADIDMGGNTPIDFLLEDSDIELLTLYVVKGVGLPETLPEHDVAIVVASDSEECREALALIEKAAPQWPRPMLNRPDRIGNLDRDKLYRLLAGVPSLDIPATIHATRAQLSDLARGAIACEDIASDLHFPMIARPRGSHAGVGLAKLDEAAALAAYLAERKEQDFFVARFVDYVSADGLYRKYRLAMVDGKPYACHMAIADRWDIWYLNAYMAFSEEKRAEEAVFMRDFDNAFAARHGSALDEMSRRVGLDYFIIDCAENQKGELLVFEADNTAVVHNMDSPVVFPYKPPQMRKIFAAFTAMLSRHAKTGKESAA

SEQ ID NO: 15466 - protein, 499 aa, BradyrhizobiumColbertium
MNEIIRNTQSSVTSTSLDPQDWSEFRALAHRMLDETIDGIANVRARPVWRPIPDDVRAAFRADVPREASDLADVYREFAEHVAPYATGNVHPGFMGWVHGGGTAVGMLADMLAAGLNANLGGRDHMPIEVERQIVEWMRRLFAFPDSASGVFVTGTSMANLMAVLVARTAALGTLARQHGIGNDGALLTAYTSQAAHGCVSRAMDVAGFGTDALRRIAVDADHRIDVAALRAQIAVDREVGFRPFLVVASAGTVDVGAIDDLRAIAELCREQGIWFHVDGAFGALAILSPELAPMLGGIELADSIALDFHKWGQVPYDAGFLLVRDGEQHRQAFAQPAAYLRREARGLAAGAVWPCDLGPDLSRGFRALKTWFTLKTFGTDRLGAAIARSCALARYLEARVLAESRLELLAPVNLNIVCFRYRADDAVNREIVADIQESGTAAPSSTTLDGRLAIRAAIVNHRTEETDIDALIAAVLEFGERRCSGPLIEVEAPPLAAQ

SEQ ID NO: 15467 - protein, 146 aa, BradyrhizobiumColbertium
MALKVELRPHERIIVGNCVITNTDQRARLLIDGDNVPILRERDILTPETADTPAKLVYLAVQLMYISPDPQTQHGTYFNLVRDIVTAVPSSWPIIEAINNNILNGDLYRALKDARKLIAYEEKLRDQYVATHPKPEADKADVSSAA

SEQ ID NO: 15468 - protein, 207 aa, BradyrhizobiumColbertium
MPVKTDRNDARGIAQVVRTGWFKPVHVKSIGSQRARTLAAARKHIIRSIAAAEQVIRGLLRPLGLKVGIVSRSLFATRVRELVGDDALLEAIMDPLLAGREALMREYARLHRLVLKAVRSDPACRLLMTMPGIGPVSALTFRSTVDDPGRFLHSQSVGAYLGLTPRRYQSGEVDRVGRIIKVGDGETRTALFELPTSFSGYQPDGLR

SEQ ID NO: 15469 - protein, 45 aa, BradyrhizobiumColbertium
MKAWAVRVAHRQGSKRAKVALARKKAVVLHRMWVDGTEFRWTAVA

SEQ ID NO: 15470 - protein, 412 aa, BradyrhizobiumColbertium
MLVARLEYLQLLHRSEYRRAGATKMDRITCNTTGMPSTGVKAFFGFLCLAILTSHTLTMWRWSEARGVYDDVCYLRQAHLFQRFGVVGLNTDATMDDDRYFVGRLKEIALPDPENLDRWPCHVRKPSGKVILQYPPGTGFLLAAFPQGFQVAPLYISASIVVCCVALLGIWMARTLSFVIGAGLFGALAVYGMINPAKASYSVAPTVALCSIIGLLTALWVNRACGSSWLIALIGLLLGAAVNLRLPNILLASGYGLFLGVAFLRSRTLASFLDSVGFVAGVALGIMPTLIAQAINAGSPLATTYGASDAVAPAFNIVVLGEYLRDPQSLLICLAAGWTLWLLRSGLRSAHQIAFLVAGNLMINLGFFLSHPIFTPYYMVPIAMLCLWTVSFAWLIQPRKSSESAAFQCTVP

SEQ ID NO: 15471 - protein, 41 aa, BradyrhizobiumColbertium
MQDWLHLKLAKSELRWPDGMHMDERSAILAAKAIEHAVSER

SEQ ID NO: 15472 - protein, 138 aa, BradyrhizobiumColbertium
MSLKRILLTAALLAGFAAPALAQPFPRPVLQYAGQFVFGPTLIVGLTVVNWNDYSPALFAASPKLPPCGLNAAASRTWVDIYNVRNTRLYGFCDLGEPFSLTQLWFSLPSARRPRSVYITLTDRLRLRRVVSNRVAIP

SEQ ID NO: 15473 - protein, 127 aa, BradyrhizobiumColbertium
MNSFLTTVERPQLGMVAALVGSLMCAVAIVWSIGSTDRVTYLGADHGQEQTAAHVRLKTLPQGSYVIERGPIYQAMRAGCRYDLNFSPQFGRHVSDRQRTKYIRSAVLVDCPPAKTKAAASTVRLTE

SEQ ID NO: 15474 - protein, 69 aa, BradyrhizobiumColbertium
MVSPGSVVAHRTPAQYRPVMVPQTVMVAPPSVQYERIPPQYATRQRVEMVSPGYSYYAPVQMNCASCGY

SEQ ID NO: 15475 - protein, 616 aa, BradyrhizobiumColbertium
MPAYRSRTTTHGRNMAGARGLWRATGMKDADFGKPIIAVVNSFTQFVPGHVHLKDLGQLVAREIEQAGGVAKEFNTIAVDDGIAMGHDGMLYSLPSRELIADSVEYMANAHCADGLVCISNCDKITPGMLMAALRLNIPAVFVSGGPMEAGKVKLQGKTKAVDLIDAMVAAADSKVSDEDVKVIERSACPTCGSCSGMFTANSMNCLTEALGLALPGNGSVVATHADRRRLFVEAGHTIVDLVRRYYEQDDASVLPRNIANFKAFENAMTLDIAMGGSTNTVLHLLAAAHEGQVAFTMKDIDRLSRRVPVLCKVAPSVADVHVEDVHRAGGIMGILGELDRAGLIDTSVSTVHAPTMNEALERWDIKRTKSEAVRTFYRASPGGIPTQVAFSQERRYDELDADREKGVVRDLDHAFSKDGGLAVLYGNLAQDGCIVKTAGVDASILKFSGPARVFESQDAAVEGILGGKVVAGEVVVIIYEGPRGGPGMQEMLYPTSYLKSMGLGKACALVTDGRFSGGSSGLSIGHLSPEAAEGGNIGLVRTGDIIAIDIPNRSINLEVSDEELARRRAAEEAKGDSAWQAQGRKRNVSTALQAYAALTTSAARGAVREVKRRVK

SEQ ID NO: 15476 - protein, 286 aa, BradyrhizobiumColbertium
MTDATLKDTSVRRHINLPAIPVSVALAVAWIVAMLLIAAFAEKIAPYGYTQLDLRNRLAAPGNAAHWLGTDELGRDVLSRLLVSIRISLLIAFGATAISAIVGTTLGFLAAHFRGAVEQLVLMLSDFQASMPFLIMALAVLAFFGNSLPLLVGLMGLFGWERYARIARGLAISANAQGYAAAVRQLGATPSRIYLRHILPNIASTLIVSTTLVFPEVILMESGLSFLGLGVQPPMTSLGNMVGYGREYLTRAPWIMLAPATTIVVTTLAVSVIGDWLRDRLDPTLQ

SEQ ID NO: 15477 - protein, 309 aa, BradyrhizobiumColbertium
MGRYLAIRIGRAALTIVLVVTFAFIVLRLSGDPALMILGPEAPPEVLAAFRKAWGLDDPIWAQYFDYFGAIAKGELGRSMRDGRPAIELVLERIPATLALTLPAFFFKVALGIPAGIYAALHRGSGIDRAVMMTAVAGFTVPSFVLALLLVLVFAVQLGWLPSGGQDSWRHAILPITTLSLGGAAVLARFTRSAMLEVLGQPYIRTASAKGVPWRKVVTSHALPNAAIPTVTILGFMVGTLIAGAVVVESVFAWPGVGRLLVVAVANRDLAVVQCILLLVAMTMVTSNLIVDFLYGFLDPRLRTKGAHA

SEQ ID NO: 15478 - protein, 328 aa, BradyrhizobiumColbertium
MRPPLVEVSAISRSYAMRSGMFGRATAVHAVDGVSLTIAKGETLGLVGESGSGKSTTGRIVLGLEPPDSGDVRFEGRPMAAPGTAAWRAQRARMQMIFQDPLGALDRRLPVAVQIREPLDIHGLGTPAEREDRVRELLRAVELTPAHGARYPGALSGGQRQRVVLARALATKPDFLVCDEPVSALDVSIQAQVVNLLCDLQAQLSLTLLFISHDLRVVRQISNVVAVMYLGRIVEIGSADDLFARPEHPYTQALVSASPAPGRRSAGRIVLSGDPPNPAARPNGCAFHPRCPRAVPRCASEVPALLAVGGNRQVACHLVTGAETRDAA

SEQ ID NO: 15479 - protein, 327 aa, BradyrhizobiumColbertium
MTQLIAIAGLSVAFSGVPVLRGVDLALQKGEALGLVGESGSGKSVTWLAALGLLPRHAQVAGSVRLDGREILGAPSAELDHVRGGRIAMIFQDPASALNPVLTIRKQLCEALALHRDLSGEAVKAEARRLLDLVGIPDATRRLSAYPHEFSGGQVQRVMIAMALAGNPDLLIADEPTTALDATIQAQILELLSLVRREMGMAMVLISHDLGVVAENCDRVAVMYAGRIVEAAPSNQLFADPVHPYAQGLIGALPPLDGPRRRLTAIPGTVPDPAHMPSGCAYAPRCALAGESCGLAAPTLAPIADDRSVACVRAEASRRAVLGMAAE

SEQ ID NO: 15480 - protein, 545 aa, BradyrhizobiumColbertium
MSKLTRRTILKSGGAAASTLLLPRFAIAQGDNRPSVTIAVQKVTNSNVLDVLREQSNVGERVFFSSIWEGLISKNWRGNLEAVPGLATEWRRIDDQTVEVKLRQGVKFHNGDELTAEDVVFTFSRERMFGETEAKNRSTIRAFEKIPTPRPGKELPPDVPAVARRIWPDLVRVDAVDKYTVRFYNATPDVTIEGRLSRYGSDIMNRRAWDESASYLDWARKPVTTGPYKVVELKPDVSLTLEAHDEYWGGRPPLKRIRFLEVPEVASRINGLLSGEYQFACDIPPDQIAGIEKNSAFEVQGGTILNPRLTVFDKNHAVLANPLVRRAFTHAIDRQAIVDSLWAGRTRVPKGLQWEFYGDMFNADWNVPAYDPKLAQDLLKQANYKGDAIPYRLLNNYYTNQVATAQILVEMWKSVGLNVQIETKENWSQIMERGPARAVRDWSNSAAFNDPVSSLVAQHGPNGQQQQIGEWTNAELNKLSEFLETSTDRAARKKAFRRMLEIAEREDPAYTVLHQNATFTAKPKSIKWKASPAFAMDFRAGNFEA

SEQ ID NO: 15481 - protein, 271 aa, BradyrhizobiumColbertium
MSKPVLGAALSIKSIPAHRDWLLERQRDLEIQDFFRADLLDSDWRSTAGEIKQMLAGHTGRLGIHGPFWGFKIDSHDPMIRQAVTKRLLQGLDAAEFLGATQMVIHSPFTTWDHNNLDLYPDNRGNLVERVKATLAEVIARAETIGCEIVIENIEDKDPRDRVRLAKALESSKVRVSLDTGHANYAHISTGAPPVDYYVETAGDMLTHVHLQDTDGFADRHWAPGEGNIPWVAVFRALGRLTSNPRLILELRNHDDVRAGAAHLAALGLAE

SEQ ID NO: 15482 - protein, 203 aa, BradyrhizobiumColbertium
MTQLKLERFVIYLHDFGSPIGARLAIMRPERVVAQIIQNGDIPYEDALGPKYADIEKSWSLPDQELRAAMREAVTEGNFRDEFLNDVRAELAGLIPPDLWQLHWSLVTERRKDAISDLLFDLKANRQWFPEHRRYLQQHKPPTLILWGPQDHYMPEESGRAYLRDLPDAELHLLDGGHWLLETNLDEVVSLMRSFLERIQPDW

SEQ ID NO: 15483 - protein, 77 aa, BradyrhizobiumColbertium
MARRRTTDTDADDLPRYFVWVRGLEGPEPQKWMAMDFGVGDWKRPLVLAYLELPADERQLSLSMLARRYPPPRVDLP

SEQ ID NO: 15484 - protein, 229 aa, BradyrhizobiumColbertium
MIMTEQGETGEAITILLVEDDAPTCWRLQDALVKAGYEVRSAGTLAEARQALGGGAPRVLLTDLRLPDGHGIELIREMRQRFPDSEIMVISALGDEESVISAITVGATGYLLKDAFPTDIATTVRDLVAGHSPISASIARFIVRRTQGAAQNSAEQPPGPALNTARLTPREIDILWGIAKGFSYAEIASHLGLSKQTVPGHIKNIYRKLEVHTRSEAVFEAVQQGLIKL

SEQ ID NO: 15485 - protein, 645 aa, BradyrhizobiumColbertium
MSELAAKAPMKAPAKSARRRLLASRLVPYLLFQALIVVATVMGLRLLQPSDPEDSALSGFSLREDGLIRPVTLPHFTSSRYSVADPPFYASTFTYRSADAAAGWSVYLPRFSNAVEVAVNGVVVLDSRRDANANRPDRNTPQIAAIPASLLHEGANEITVRLFVWGPLKGFLDTVYVGPDAALRPAFETRTLLFVTLPVVFSAWQAILAVILAIMWLMRRHEPVYGVLAAAMVLGVVQAFAPPPVPPVTVSRLAAVLLASAPIESALIVMFAVLFFGWRWPRYGTLLFVPGILVFAVGLLGGPPLPRILFLVLGIPTVGLCLFLMACITATAVVRRQDAASFTIGCAVTIVLVCWIQDILTVLEIATNDRIFVSRLSYSAMLVAIGAGLTWRFARALNQVDSFAGQLVTRVREAEERLKASFAREEERARAAALANERTRLMRDLHDGLGGQLVSIVALSERGNEGATIADAARAALKDLRLVIDSMDDIGGDLMLALGSWRERATAQLRPHDIALDWRVATPQGLPLHPELRPWHVIQIIRILDEAVTNAVKHAQARHVAVTIETRDGSDRPYGVISVADDGRGFALAGNSTAAGTGQTARGLRNMRSRAARCGAMLDLSSDASGTRVQLQLPQRFPDSDMAAG

SEQ ID NO: 15486 - protein, 96 aa, BradyrhizobiumColbertium
MSKRAGALSAGLTIMALAGAAMVSLGTSPAQAVVYCKTVGVPKGCVVRPTAAVVVAPGAPVARAAVATPGVGAPGVGVRAGTPMNRGGPVNRVGRR

SEQ ID NO: 15487 - protein, 74 aa, BradyrhizobiumColbertium
MKISVLAALLLTATALPAAAQSGPSAQEQMACRGDASKFCAEHIGKPPQMNACLRENKSKLSDSCRKVVEARGG

SEQ ID NO: 15488 - protein, 140 aa, BradyrhizobiumColbertium
MKHVGNCFCGAVTVEVAGAPEAMGYCHCRSCRSWSGGPVNAFSLWKPEAVRITEGAQNVETFVKTPLSQRKYCRKCGGHLMTNHPPLGLVDVFAATIPTLAFTPGVHVNYSETVLPMHDGLPKLKDFPAEFGGSGEMVQE

SEQ ID NO: 15489 - protein, 262 aa, BradyrhizobiumColbertium
MTQIDHQVHSIGPDVAGSRIFKFLAFLYGIAAYLVFFVTILYAIGFVMGVMVPKTIDSGAEAPVVRAVIVNLLLMSLFAVQHSLMARQQFKAWWTQFVPKPVERSTYVLFASLSLLLLFWQWRPLPSVVWNVEDPDLAVTLVTLSLGGWVLVFTSTFMINHFELFGLHQVTNQLVGKETAPPRFKTPLLYKFVRHPIYLGFIVAFWAAPTMTAGHLLFAAVTTLYIFVGIALEENDLVALFGDEYRQYRQRVSMLIPWRRSV

SEQ ID NO: 15490 - protein, 514 aa, BradyrhizobiumColbertium
MRFHFENNVLDGDLRELTRDGAAVPLQPQVFDLLLYLVTERDRVVSKDDLIGRIWSDRIVSDSALNSRINAARKALGDDGSTQRLIKTIARKGFRFVGEVREEAAASCAQAEAEGTPPRVVDRPAVAVLAFENLSGDPAQDYFGDGISEDILTALSKQRWFMVIARNSSFTYKGRAVDIRQIAEELGVRYVVEGSVRKADNRVRITAQLNDAVSGRHLWAERYDRELVDVFAVQDEITNAIAAAIEPQIHAAENVRSRRKPPLSLDAWDLLMRALSHYWRVTRQDHDAARALLERALTIDPNYGQALSLLAVNDMFGVHLGWVELAVVAPAAEAAALAALRCDHEDSWAHALGSVCFSTRRLADALSEFEQALALNPNFSLAEGYYALALCYAGRPKDSFEAAQRAIRLSPRDPSLAVYHGIAAYARFTERRYEEAIALAREAIRHRGDLTGAYRVLAVCAGMTSDGALAEMALGELRRTQPGISLHWISTQLPWANDADREHYLEGFRRAGLR

SEQ ID NO: 15491 - protein, 161 aa, BradyrhizobiumColbertium
MDIQATTIPADDDHGPDIAGLDVTAKAGLQHCLQLLGNAGLRPTRQRLALGQLLFLGGHRHVTAESLYEEAMAANTYLSLATVYNTLNQFTEAGLLRRIAADGLKSFFDTDTSVHPHFYLEGEDVLVDVADGLAFTKLPEALPGHEIARLDVIVHLRRKRT

SEQ ID NO: 15492 - protein, 103 aa, BradyrhizobiumColbertium
MSKPIPDKAEIALEYPDKFYVGTFEHSSRFEARLDGSGVTVVLQHPGATDERKSVHLHINFGLLAGILRDLAGSVAGIPKDDIAHREQLAEALDELRRALGTN

SEQ ID NO: 15493 - protein, 516 aa, BradyrhizobiumColbertium
MPKRVLLGLLLACGLTAPTLAQEPKAGGVINAVIQPEPPGLMLAMIQNGPTQMVSGNIFEGLLRYSPKLEPQPELAESWSVSEDAKTYTFKLKKGVTWHDGKPFTAADVLFSMEMLKQTHARARTNLAQVDRVEAPDDYTVVFTLKQPFGPFLGIFEVGSMPIVPKHLYEGTDFKTNAYNNAPVGTGPFMFKEWQKGSFIRLVKNPNYHEKGKPYLDEIYWQIIPDAAARSVAFETGKVDVLPGGSVENFDVPRLSKLKDTCVTGAGWEFFSPLAWLWLNNRQGPLADKRVRQAIMYAIDRDFAKDVIWNGLGKVATGPSASTIKYYTDDVKKYPYDPAKAKALLKEAGYKGEKIRLMPLAYGETWQRWGEAVKQNLQDVGMNIETIATDVAGGNQKIGDWDYDIAFTYLYQYGDPALGVGRNYISSNIAKGQVFNNVEGYSNPEIDKLFAEGAVATPDSKRKEIYEKAQKILVEDVPVAWMLELQFPTITRCKVKNLITTGIGVNDGFKDAWLDK

SEQ ID NO: 15494 - protein, 323 aa, BradyrhizobiumColbertium
MLTFVAQRVVKGVIVLLAIVVLNFFLIRLAPGDPAVVMAGEAGASDQVFVKQLREKFGLDKPLPEQLFIYVKGVVSLDLGFSFRQQAPVAKLIGERLPATLLLTLTAFAISLMLGILFGTFAARFAGTFLDTAITVFALIFYAMPIFWVALMGILLFSVTFDWLPSFGYDTVGGNYTGLAHVVDVARHLVMPGMTLGLFFMATYTRMTRASMLEVKRLDFVKTARAKGLADSVIQRRHVLRNALLPVVTLAGVHSGTLIGGAVITETVFAWPGIGRLMYDALLQRDYNLLLGVFVICSAMVLIFNLITDLVYRLVDPRIEFAS

SEQ ID NO: 15495 - protein, 279 aa, BradyrhizobiumColbertium
MKQFWKSILKSPSGVIGLVILLLAISVAVFGPMLFPNSPWRMVQRPFLPPFTLSTVPSGTDALGRDVFAGMIFGARVSLLVGLVSTLVALVVGVPIGAMAGYFGGKVDDALMRFTEFFQTIPSFALAIVLVAILQPSIYSIVASIALVSWPPVARLVRGEVLSLRTREYVQAAVVTGQSNSWIILREILPNALSPVIVLASLMVATAILLESSLSFLGLGDPNLISWGYMVGAGRTVIRQAWWITVFPGVAILISVLGLNLIGEGLNDALNPRLSREGR

SEQ ID NO: 15496 - protein, 91 aa, BradyrhizobiumColbertium
MADEAVSALDVSVQAQVLKLLEDLKARLGLSMLFITHDLRVAAQICDRIAVMQRGAIVELKPTAQLFAAPEHAYTRELLAAVPGRKQASAA

SEQ ID NO: 15497 - protein, 94 aa, BradyrhizobiumColbertium
MKAINLAIAALVTSGLLVAPFAAEAKKARPSRTYTTGVGAPTYSGAGAPVAQPRSSYGSSGQTVGTVTAPSFGSYNWPSVGVTNSVPTWSNTTR

SEQ ID NO: 15498 - protein, 106 aa, BradyrhizobiumColbertium
MTGAELKQLRNDLSDALERKLTAADMAKLCGLPERGGADTIRRWEVSGPTPEATKILRVLAMASERYPILEKFDVFDRHDVREEDRPAKRAAFREQMRDEARRRLG

SEQ ID NO: 15499 - protein, 259 aa, BradyrhizobiumColbertium
MTARKARLPGPDVLEFKTMKKILFATVALLAVGAAAPAVGADLGNRNYYKTPAPAYAAPIYNWTGFYIGAHLGGAFSSDNNFNGLSTGNNGNGRFLGGVQVGADWQLNPYFVVGLEGQYSWLSGSVGAVFPGGVAYTNDQRGLGSITGRVGYTWGPGLLYVKGGYAYSDNNEKVTVGGVPTAFVITGDHRNGYTVGAGLEYMFAQNWSAKAEYQYYNFGDASFTGGPLAGTGSFTTDDHTFKAGVNYRFNWASPAVARY

SEQ ID NO: 15500 - protein, 127 aa, BradyrhizobiumColbertium
MKSLASQTAKATDEIRTQIASMQEVTTSAVGAIQGIGRIIGEINDVTTTIAAAVEEQGAATREIARNIQHAAGGTSEVSSNIVGVSTASAEAGAAAGEVLSASDALRREADMLRGEIDAFLNDIRAA

SEQ ID NO: 15501 - protein, 353 aa, BradyrhizobiumColbertium
MSSKTDTAQSSAEALRYPWEQHPGPEQIVEIRPGVLWARLKLPFRLNHVNIYLLADGDGYAMIDAGFGNEETIEAWTKLFDGPLKGVDITRLIVTHSHPDHVGLAGWIVERFNCPLVMSQVEYLQSVYHQNRGTDERREAQRLFFRRHGMDESLTEKLLGRGQDYLKRVSVLPPSYRRISHGEDVVIGTRRFRVITGGGHALDQVMLYCADDKLFLSADQVLSKISPNVSVWAVEPEQNSLGEYLASLASLTTTLPYDVLVLPGHGVPFYGLKTRIKQLADHHEERCRLIAEACREMPQTSRALVPVVFNKHVLDEHQMGFAAGELVAHVNYMIVEGRLTAEMQDGVLRFRTT

SEQ ID NO: 15502 - protein, 470 aa, BradyrhizobiumColbertium
MDMVTPAGQADQLLGALRDRLGAAAVLMGSEVPARNCNDWSASLPQTPLAVIRPLDAQGVADAIAACRQARLPFVPQGGLTGLCRGASPEAGWVAISLERMTGIEEIDRASMTMTVKAGTPLETIQKAADEAGFFFPLDLGSRGSCAIGGNLSTNAGGNRVIRYGMTRELVLGLEVVLPDGTIITGLNKLMKNNAGYDLKHLFIGSEGTLGIITRVVLRLFPKPRSTMAALCALTDYAAVIALLDAARSGLGPLLSAFEVMWPDYWDVITNRAGVKPPVAAGHGLYVLVEAQGTDESVDAPRFQAWLEELMERGLLADAAVAQSLAQTQAFWRVRDICAEFGQVLGPHIAYDIGLAVARMDEFVTRCKAALASGIKGCESVYYGHIGDGNLHLVSWVGGLSVAQQPKEEMDAIIYGLVRDMGGSVSAEHGIGTLKKQWLGHARSEAEIALMRTLKAALDPDHLLNPGKVI

SEQ ID NO: 15503 - protein, 39 aa, BradyrhizobiumColbertium
MEQLEKAPSVEDRDKIERQLEQINTALDFLDGPGAKDER

SEQ ID NO: 15504 - protein, 677 aa, BradyrhizobiumColbertium
MRSIMDTQMITAAKPLMAHARPPKPAPFLPMSRAEMDALGWDACDIVLVTGDAYVDHPSFGMAIIGRLLEAQGFRVGIIAQPDWHSAEPFRALGKPRVFFGVTGGNMDSMVNRYTADRRIRSDDAYTAGGEGGKRPDRCTIVYAQRCREAFKDVPIVLGGIEASLRRIAHYDYWSDKVRRSVLADAKADLLLYGNAERAVVEVAQRLAAGEAPRELDDIRGVALFRKVPPDYTELHADDLDSADEGASRQRGPTVIRLPSLEQVEQDREAYARASRVLHRESNPGNARPLVQRHGDRDLWLNPPPIPLTTEEMDAVYDLPYARGPHPSYGDARIPAWEMIRFSVTIMRGCFGGCTFCSITEHEGRIIQNRSEGSILREIEKIRDKTPGFTGVISDIGGPTANMYRMACKDPKVEAACRRPSCVFPEICPNLNTSHDDLIRLYRKVRETKGIKKVMVASGVRYDLAVESPEYIKELVTHHVGGYLKIAPEHTERGPLDKMMKPGIGAYDKFKRMFDEAAERAGKKYYLIPYFIAAHPGTTDEDMMNLALWLKKNRYRADQVQTFLPSPMATATAMYHTGVNPLRGVRHGGSDKVEAIKGLRQRRLHKAFLRYHDPDNWPVLREALIEMGRRDLIGSQPHQLVPAHQPPGTGKAAGTKRPLRSGGRTQRFTTKGLRVMK

SEQ ID NO: 15505 - protein, 97 aa, BradyrhizobiumColbertium
MQVYNVVKFKVKSGAEATFLDAHRDGKAKWPGLEHGVIIRTGDRTFCLVGTWASQDALVAARSAMIRTLDSFRSVLEDQGNGRGVTDAVSGEVVLAL

SEQ ID NO: 15506 - protein, 137 aa, BradyrhizobiumColbertium
MNLVEITLQALDAAERAISPGQPVYMLNLLRYRAYARYEEGFDAAPCSGREAYHERYRPAFRRLAAGKPLVRMFSGPVLTSLVGSPSERWDEAAINEYGDFTTFRSIVDTETYRREAAPHRHAALEDFRLFALAKAM

SEQ ID NO: 15507 - protein, 311 aa, BradyrhizobiumColbertium
MSTTTLPPDVSRLLAFVRVVEAGSFAEAARRAGTTTSAMSKAVARFEKSRGLRLLHRSTHSLALTEEGDRLMAAGRALVESLARVQSVLGEVARDDGGRVRVTAPASFARACILPRLPAFLRERPEIEIEVKFRNEILDLAAEGVDVAIRSGPLDRAPGHQARRLCTFSWIACASPAYLNARGAPATPYELSAHDHVGFRNPASGQILTWRFADPRGKGPIRVTPKPKHICDDAHASLALIANGFGIGWGPAWLVNEDLRAGRLVEVLAPWRASAEPLWMLRTSDRRPPPRTQRVMSFLATLPAAFTEKAV

SEQ ID NO: 15508 - protein, 152 aa, BradyrhizobiumColbertium
MKRDSRLSGVLHVLLHMAQQPGPFTSETLAKAMDTNPVVIRRIMAGLRELGYVRSEKGHGGGWRLACDLSKVTLRDVYAALGSPSLLAMGNRTESPGCLVEQAVNAALDQAFHDAEALLLSRLGEVTLAMLGEDLRKRLGSRKIHDISAHRA

SEQ ID NO: 15509 - protein, 227 aa, BradyrhizobiumColbertium
MTDIQAAFSDPQFVARYTEGPRRFVPGYEAMQSMAAILLAESVPSGGRVLVLGAGGGLELKAFAQAHPGWSFDGVDPSAAMLALAEQTLGGLASRARFHQGYIDDAPPGPFDGATCLLTLHFVDVAERRRIASEVRRRLKPRAPFVIAHLSAPDGEKERPLWLARYSAFLASSGVEPDQAAAAKDAVSNHLQILAPAQDEAILREAGFSDPTLFYTGFAFRGWVAYA

SEQ ID NO: 15510 - protein, 37 aa, BradyrhizobiumColbertium
MNGIKSVEEKGSQPPMTVDFRLWPFAGMQQRADDVRL

SEQ ID NO: 15511 - protein, 195 aa, BradyrhizobiumColbertium
MSANSEIKSAGANIQASTISTIVLGFAADPMARWVWPDSSEYLRIMPQFVKAFGGRAFEHGTAYITEGARAAALWLPPGVEPDEMAMDALMAQSLRPEIADDIGHMLQGMAEHHPREPHWYLPLIASDPNWIGQGLGTLLMKHALRRCDEEGIAAYLESSNPRNISLYKRHGFKIIGEIQHGTSPTMTPMLRTAS

SEQ ID NO: 15512 - protein, 68 aa, BradyrhizobiumColbertium
MAMRAEIKRAIEAASRGETQQLYWSLVVMGNLLSNALDRIDALEKVEVIDGQSEVDPCEVRALVDAQP

SEQ ID NO: 15513 - protein, 152 aa, BradyrhizobiumColbertium
MLRMALLGLVILLSVGVLSAMELTAPPRRAVTILQPPAEQSLTIPASHSPLPKADRLEVAVSGAMPTEAVSVENSAAQDVLISSLPPAPNVRQRSKPKPVASDERPKPKPKASVVKRTTNAQRARIASETKSCRLKAFGGLLKALNLNGCEI

SEQ ID NO: 15514 - protein, 161 aa, BradyrhizobiumColbertium
MQRANPASFREAASRFATGVAVLTALDEHGRICGMTANSFVTVSLSPPTVLVSVMPGRMHRAISATGRYCVNVLPDHGRDLSRHFASQPNAGADPDYEIVDGLPRLFGCIAYFACEVTRHVDVSDHTLIIAEVSACDHRDTTPLVFFSSRYHRGAGVPVDR

SEQ ID NO: 15515 - protein, 416 aa, BradyrhizobiumColbertium
MARNVGIVGAGIAGLHLALYLQKHGVDATIITDRPPEDYRNIRLLNTVAHHHVTLAREDYLGVNHWPDPKDHYYYHDHVFNFPQPLSFRGDFSKPSRAVDYRIYLPALMQDFTSRGGRIEYRRIEERDIRPLVARFDLLVVSTGKGPLGQLFTYRPEHTPYSQPQRRLCVGLYTGVRQPDPMNVTLSVSPGHGEMIVIPTVTFGGIASALLMENVPGGDMEELATLSYDDDPKHFLKVLLGKLEKHHPTTYDRIDTARFDLAQPQDLLQGGVVPTVRNTVVEFDGGKCAIALGDVHAVVDPMMGQGANVASYAAFVLGEEIVNADALDARLCEKIDLKRQDRVLAASRWTNVMLQPPSEALGMLIGAMSQNPALANEFTENFNYPDRQWDRISTPQRIQAWIERMSAPPEPVRAIA

SEQ ID NO: 15516 - protein, 309 aa, BradyrhizobiumColbertium
MDRIDCLRAFVRTLEAGSFSAAAKELGIGQPAISKRIAMLESEFGTQLFSRTTRTLKPTAEAHRIYDLARQILDNFDMARSSVEAAAPRPSGTLRIGVPSSFGRRFMMPVIAEYVRHYPEVRVDIRFSERFVNLVEEGIELALRIGKLEASTLVARRLGTVQRYLVATPTYLHGRPLPRTPDDLGSHQCIVYSRLSPAQQWAFESEHGRHVATINGPIHVDDADAMQAATMHHLGIAILPDWNAAEGLRSGELEHVLPDYTIAALPLHAVYPETSWMSLRARSFLDLLVERAEHFTPAPYHGRAAVSGG

SEQ ID NO: 15517 - protein, 343 aa, BradyrhizobiumColbertium
MTPMKKIDFLSFGHWTPSPQSQTRSASDTLLQSIELAVAAELLGADGAYFRVHHFARQLASPFPLLAAVGARTSRIEIGTAVIDMRYENPLYMVEDAGSADLIAGGRLQLGISRGSPEQVIDGWRYFGYRPADGQSDADMGRRHAEVFLDLLRGEGFAEPNPQPMFPNPPGLLRLEPHSQGLRERIWWGAGSNATAVWAARLGMNLQSSTLKNDETGEAFHVQQAAQIRAYRAAWKEAGHSREPRVSVSRSIFALMDDRDRAYFGSERGGEDQIGFIDPRTRAIFGRSYAAEPDVLIEQLRQDEAIAEADTLLLTIPNQLGVDYCAHAIEAILTQVAPALGWR

SEQ ID NO: 15518 - protein, 63 aa, BradyrhizobiumColbertium
MRRCDELAIGFAVPSESGTFAIFSRLLDGSCALEERKMPVLILWAVPAVLVIGGGIYLIGHMQ

SEQ ID NO: 15519 - protein, 114 aa, BradyrhizobiumColbertium
MKKLMLISAAALLVSTSAMAQTTVTTTTGAGHGATVQIEPEYRTRIRSYVTEHKIRPVETREKIVVGSPVPRDVELAAVPSDWGPSLTKYRYVYSGSRVMLVDPQTRMVVQEVE

SEQ ID NO: 15520 - protein, 51 aa, BradyrhizobiumColbertium
MDANAGAIDQPAGGMTAKQRQAAIRWARQRHRETAFKQHNVNDAEIGTTVT

SEQ ID NO: 15521 - protein, 177 aa, BradyrhizobiumColbertium
MRILKLSAAAAALLAGTALAVAQSSSTVGTGGSSAGGGTSNSTVGTGGSSAGGSGSGSASTLGTGGSSAGGGTSSSTVGTGGSAAGTGSGSGSASTLGTGGSSAGGGKSSSSVGTGGSAAGSGSNSASTVGTGGSSAGDGKSGSTVGAAGSSAGHASDKGMEKGKGHNKDEWKKDKN

SEQ ID NO: 15522 - protein, 126 aa, BradyrhizobiumColbertium
MLRRRRNEQINRCDHGAGSDERRRIGRSHGKDRQDGIRRDLQGHGREACRRQHHRGRLVAFGHDRIHLVERLAVELELGRRIVGECAGRRRQRIELLVDGGRAWLHQRQHHHRQRLHDLDLVTLTS

SEQ ID NO: 15523 - protein, 142 aa, BradyrhizobiumColbertium
MRTLLTTSAVAVLLAAASPVVAQTSITGGSGGSAAAGGTSASTVGTGGTSTSGTGRTGSSIAAGGSAAAASGKTQTGVSMNKGNGPVLNSNARAQAHDGGTFSRSHTRTKVKAGEQVGSTTKTMSHVPGSKPTMSRTTTTAR

SEQ ID NO: 15524 - protein, 152 aa, BradyrhizobiumColbertium
MKTTAAATIVLLASLSGARAESWTTYRIAETGTSVDIPASVFTDIVGKPDGYGLQFRTSDGRADLTVQAISNRSRLSPAAFLAGKNPPSGIIYKRITPSFFVVSSVKRDKIWYNRCNFSRGYVHCVLINYPAAEKRRWDAVVTRISRSLRAD

SEQ ID NO: 15525 - protein, 72 aa, BradyrhizobiumColbertium
MKNFSNAEFSPEVIEIMTRALEAAVASLPEPVHSSHVNALAESILRTASAGERNVADLQRIALMELQLMPRN

SEQ ID NO: 15526 - protein, 508 aa, BradyrhizobiumColbertium
MQAATAPPAWRELVPTFCIATATIGFAPVLHLANPALAITVEVLVGIAIVVSVPTYAPAIAIFVLFFQNMFVSILSPLVPLPSDLDFIKGYNFLVCSVMWLATFALYLLGQRNQSAEVNRIMRFGVVTLAVVSLYFAIGFGQTGQAAAVYLRNIVLPLFLFQLSLLTAATYEVRITPFLATLAVILMLCGYVELAFRDVWLAITNGYTFWGFDELKATHSGVWEAQMRATGNVPVDLKDRFSFDFLNTPLLEGFGLSKMLRIHGPNMHPISFAYGIGFLGLFLFSVGRPLLALAALPLLVFCSVKGALIVVVFVVAGWISTRLLGAVVTLLLGLLGLIAFAVVAIRIGLQIGDYHVIGLMGGLNGFLENPFGRGLGVGGNLSESYFSIDWSAAQAAGTIDGAVESAVGVLLYQMGIAAFVPLAFYFTVALKAWRLYASSGYLTQGLAGFGVMVVLLNGLFQEEALFAPLALGLMLSLAGLVIGSDVRMRTVAVEDAALAQLTGYQPVT

SEQ ID NO: 15527 - protein, 382 aa, BradyrhizobiumColbertium
MTSCGRLLFAAVLLSISLSRPVSADDCVPLPSTVAPERLAALSRGFNADGWINGAPPSRALLQQLRKAGMGHVRLPVPAERVMPRFAAKADRDETLRVLDNALKQLTSLGYSTSVDLHPGERFNRLHKDDPDAAVHELQEAWSALAQVIRSFPPDRIFAELLNEPDIEADRWQREVEALAAFVRRLLPATTLIIGPVNWQRADSLPRFRPLADPNIVYAIHFYDPMVFTHQGHWDAHDPLHDIRDLPYPIRADDPAVQALRQDLQDRNATKALAMLDTAIAAAKDKPGADRWLAPALAWQQQFSRPIIVNEFGVLKAGAPRESRLRWLAEVTAYARDHCWGWAHWELAQGFGLVDSQTGRPDPDVMRALLGTPRAPAARRYR

SEQ ID NO: 15528 - protein, 687 aa, BradyrhizobiumColbertium
MTPAPGGTGPALIKGSLTVSGTLVFLRENGRRILTLAAALFALGVVVLMILPVRYAATALVVLDPRELRVTSDQEVLPGIGQDAAALQSQIEIAKSDGFLRPLIERLKIADDEDIAGGHTDMTRLLKSSRNRLEITRRGLTYVIAISFTSNRPDRAAYYANAIAEAFVASQGRVRTEATDEAADWLKDRLKTLSERLRASEDAVAAFRLEHNIVNAGKESTTQQLRVTDLTQQVSAARARTEEAKARYDQVQRDVKANVEGPVKQDLLSMLRAQRSALNDQIAQKKAVYGDRHPDLAISYSQLADINRQIEIERKKNIETAKSEYEAQREQQNALEKQLKAVETKMLVDGQALVKLQELQRDADANRNIYEQFLSRFKTTNEQRQLQASQTKIASPAIPPLRSTRPPLALLLAALAIGSLLTSTAAVAVMTSVSADKPATVQAPAPVEAEDAGQEVHPPAAAVRQTEAMPSLPVWVRIPELASAAGTNTVWQRPVAAAGEPDLAPHLQPLLERIDRLPVRGCKVALVLSVGKSAGGNTVARSLNRAAVKRGMMSVLIRLQPEFAGSQPPVTEWHDGSTTAGLQSIDELLSAGRKPDAAPEDDIRSEFDLIVVHASDLALQPDAIALAAHADVIVLVARAGELGSAAMRRVTASLSKCAGVPTGIVVNHVPAGSAAPQPEGGALGLAV

SEQ ID NO: 15529 - protein, 347 aa, BradyrhizobiumColbertium
MDIKTAKAAILVESGKPLIVDEFNLPETLEHGQVLAHVHTSSICGAQINEIDAVKGVDKFLPHLLGHEALATIVETGPGVVSCKQGDTVVMHWRPGKGIQSNTPVYSWRGKRLNAGWVTTFNEYAVVSENRVTPVPASIDRTSAPLLGCAVTTALGVVNNDAQIAIGEAVVVFGVGGVGLNIVQFAAMVGAHPVIAVDRLDNKLAMAKDFGATHTINSEGAKDVAAEVRSITGADGPDKVVETTGVKNLIELAYEITAKKGRCILVGVPREKAEIYTLPLHFEKVLKGSEGGQCQPARDIPRLVRLSDAGKVSYRGIVTHEFALDDINDALDLMRSGTSGRILLNIS

SEQ ID NO: 15530 - protein, 221 aa, BradyrhizobiumColbertium
MGRLLNIVTPLHTATKRDYMARMNDDKIGCSLKAREYEADYWDGDRRFGYGGYRFIEGRWAPVAKALIETYGLKDGSSVLDVGCGKGFLLYEMQKILPGLKVVGFDISKHGLANAHEQVKPYLFNYRAQDIYPYGDDSFDLVISLGTLHNLRLYELEAALKEIERVGKNKYVMVEGYRNVAELHNLECWALTAESILHTSEWIWLYGKLGYTGDYEFIYFE

SEQ ID NO: 15531 - protein, 108 aa, BradyrhizobiumColbertium
MPTKPTIARIWRGRTRRDLADAYQAYLQAEGIPPLLETALGVQQLREDRDAETWFTTISDWADIAAMTAFTRGEPTKVHHLPRDPEFLIELPERIEIHHILIDEQGLR

SEQ ID NO: 15532 - protein, 118 aa, BradyrhizobiumColbertium
MTIRRTFIALAAAGAMLSTAASPGLAAPLPIGNPGAESGVQQVQYRHGHGYRYGHHHRRHGTGAAVLGGLAAGAIIGGAIANSQAQSNAASYCAQRYRSYDPGSGTYLGRDGLRHPCP

SEQ ID NO: 15533 - protein, 263 aa, BradyrhizobiumColbertium
MSQTEEAGLTPGQVQNFIADGFVKIENAFSAELAKQCRDALWADIGLSPDRPEQWTRPVVRVGSKASPPFIEAANVASLHRAYDQLVGEGRWLAPRGLGTFPIRFPSTESPGDDGWHVDMSFGTADPDFMEWRANVKSSGRALLMLFLLSDVGADDAPTRIRKGSHATIARELLPHGDAGATLRQLASENWASTKDCKIELATGAAGSVYLCHPFLVHAAQPHRGTRPRFMAQPPLLPKGEFDPALPPSPVQIAIRQACGLTV

SEQ ID NO: 15534 - protein, 118 aa, BradyrhizobiumColbertium
MRISQAFKFEAAHRLPNVPETHRCSRLHGHSYRVEVQLDGPVDPHTGFVADFFDIEKCFADIMGALDHHCLNEVEGLENPTAENIAVWIWDRLQPSLPQLSAVRVYETADCWAEYQGR

SEQ ID NO: 15535 - protein, 499 aa, BradyrhizobiumColbertium
MAATDRQPIQDLDQPEQPAMGPRGSRGLGLSGKLLLLTIPLVMIAAVLLYVPAIANFWVNRLNDRVAAANTAALVLDAAPLGMVPDSLSRQILKSINARAVAIKMGQQRRLLASDNIPTAIEHDIDLRDMTAWEAITGSFRMMLETGNQAIRIVGPGVGNAQFIEIVTDELPLRKQMYRFSRNLVVVALIIAVLTAGLVYLALHYLFVRPMRRLTASLVGFHENPESSAGIIVPSQRSDEIGVAERELSDMQRDLMSMLNQKSRLAALGLAVSKINHDLRNLLASAQLLSDQLASVPDPRVQRFAPKLVRSLERAIAFCQSTLSYGRAQEAAPDRRMILIEPVVMEVRETAGLANDASIAWVAAIERGLAVDADPDQLFRVLLNLVRNAAQALESHAAGEGRVQQIRITGKREGAVAILEVSDTGPGVPQKTREHLFEAFQTSGRPGGSGLGLAIAAELVRAHGGDIHLVEGTIGATFRIVIPDRPVELLSVRNERARA

SEQ ID NO: 15536 - protein, 44 aa, BradyrhizobiumColbertium
MKRTYQPSKLVRKRRHGFRARLATAGGRKVLAARRARGRKRLSA

SEQ ID NO: 15537 - protein, 128 aa, BradyrhizobiumColbertium
MDRLRQRADFVAVANGARVNNPAFVLQSRRRDDLGPVRIGFTVTKKNGNAPERNRIRRRLRELVKRLDPVSMQPHHDYVLVGRRDALSRDFATMLDDLRIAFTKPARHTAKARGHRPGPAAATSRKPD

SEQ ID NO: 15538 - protein, 617 aa, BradyrhizobiumColbertium
MTDNRNTILAVILSGLVLIAWQYFYNVPQMEKQRAQQQTQAELQKGSTPQPSASTTPGSAPQPGAAQPSTPAVNQAQPVVARETAIAASPRVKIETPRIAGSISLKGGRIDDIALVQYRETVDPKSPPIILYSPSGTAEPYYAEFGWVAATGVTAKMPDAQTVWQQEGSGSLTPSTPVVLKWDNGDGLTFRRTIAVDDHYLFTIKDEVSNVGNAPVTLYPFALISRHGAPHVSGYYILHEGLIGYLGDEKLKEYGYKQVDEAKQVNFNNVTNGWLGITDKYWASALLPDTNARLQARFSSNPVGKVHTYQTDYLLDPVTVAIGGTATANARLFAGAKEAGVVGINFPLAGLGGYNKELGLNHFDLLIDWGWFHFLTKPMFLGLDFFFRFFGNFGISILLVTVIVKLLFFPLASKSYASMAKMKSIQPQLLALKERYPDDKVKQQQEMMEIYRKEKINPVAGCLPVLIQIPVFFALYKVLFVTIEMRHAPFFGWIKDLSAPDPTNLFNLFGLIPFDPTTIPVFGYYLALGIWPIIMGITMWFQMKLNPTPPDPTQQLIFNWMPLIFTFMLAGFPAGLVIYWAWNNLLSVVQQSYIMRRNGVKVELFDNLKATFVRKAT

SEQ ID NO: 15539 - protein, 122 aa, BradyrhizobiumColbertium
MMAAHRLMLGLAGLMGAAGVALAAASAHGADATRLASASAMLLFHATAILATGALLARGLLHGGIGLVAAFGFVIGAALFAGDLALRQYAGHSLFPYAAPTGGTVMIASWLTVTLAALVAKS

SEQ ID NO: 15540 - protein, 295 aa, BradyrhizobiumColbertium
MTDISPLDQARILSEALPHMQQYDEETIVIKYGGHAMGDEETAKNFARDIVLLEQTAINPVVVHGGGPQIATMLKRLGIVSEFAAGLRITDAATIEIVEMVLAGSVNKQIVGYINEAGGKAVGLSGKDGNMVKASKTTRTIIDPDSNIEKAIDLGFVGDPEKVDLTLLNQLIGYELIPVLAPLATSKDGQTLNVNADTFAGAVAGALKAKRLLLLTDVPGVLDKSKKLIPQLSVKDARKLIADGTISGGMIPKVETCIYALEQGVEGVVIIDGKMQHAVLLELFTNQGTGTLIHK

SEQ ID NO: 15541 - protein, 328 aa, BradyrhizobiumColbertium
MALPAAVVSFFFSSAPAIADLKICNRMSYVVEAAIGIDDKAATATRGWFRIDPATCRVVVQGTLSADRILLNARALGVYGASPIPQTGSDMLCVAQDNFVIAAARQCRSGQTQVSFTQVTPTQGADGNLIAYLAEDSEYDDEQARLAGIQRLLVIAGYDAAPIDGVDGPKTQAALAAFLKSRGLSPDIVNSQTFFKTMVDAVQTPSAAGLTWCNDTPHKVMAAIATDDGKSVTSRGWYRIDPKTCLHPDVSGQPKQIFSFAEAVDADNRVVKLRDRPLNWGGDRQFCTRETKFETSEQTDCGARGFAPTGFVAVDMSSGGKTLRFAVP

SEQ ID NO: 15542 - protein, 217 aa, BradyrhizobiumColbertium
MFDLDNTLYPHHVNLWQQVDARIGEFVCSWLNVGREEARKIQKDYYLRFGTTMRGMMTLHGVSADDYLAYVHKIDHSPLEPNPALGAAIAKLPGRKLILTNGSVDHVDAVLARLGFASHFDGVFDIIAAEFEPKPAEQTYRKFLSDHAVDPTRAAMFEDLARNLTVPHRLGMTTVLVVPDGTKEVVREDWELEGRDAAHVDHVTDDLARFLGKLSPG

SEQ ID NO: 15543 - protein, 54 aa, BradyrhizobiumColbertium
MDWGAFSGFAGVESRRTPPLPTLRCRPGSALTPVQETTRVSLATAYPRTSPDHP

SEQ ID NO: 15544 - protein, 281 aa, BradyrhizobiumColbertium
MSLAALESTINSAFDARDGISTSTRGEVREAVDQSLEILDKGEARVAERGADGKWKVNQWLKKAVLLSFRLNDMGVIPGGPGKANWWDKVPSKFEGWGENRFRDAGFRAVPGAVVRRSAFIAKNVVLMPSFVNLGAYVDESTMVDTWATVGSCAQIGKRVHISGGAGIGGVLEPLQAEPVIIEDDCFIGARSEVAEGVIVRKGAVLAMGVFLGASTKIVDRETGEVFMGEVPEYSVVVPGALPGKPMKNGQIGPSTACAVIVKRVDERTRSKTSINELLRD

SEQ ID NO: 15545 - protein, 388 aa, BradyrhizobiumColbertium
MTDALSIAQDLIRCPSVTPADAGALGVLEKILTAAGFACHRVTFSEPGTADVDNLYARIGTEGPHITFAGHTDVVPPGDESAWSVGAFSGEVKDGVLHGRGAVDMKGGIACSVAAVLEHLAGNGGKPRADGKGSISFLITGDEEDVSINGTIKLLKWAAERGEKFDHCVLGEPSNVETLGDTIKVGRRGSQSGTLVVDGVQGHVAYPHRASNPVPDIARLIVAISDEPLDHGSAQFQASNLEFTSVDVGNKASNVIPGEARAKFNIRYNDNHTQASLRELVEARLAKACGNRIKARIVWEPSNSNVFVTKPGPFTDLAVAAIEEVTGRKPELSTSGGTSDARFISSYCPVIEFGLVGQTMHQVDERVPVADLERLTRVYRGILTRYFG

SEQ ID NO: 15546 - protein, 245 aa, BradyrhizobiumColbertium
MPRYKLTIEYDGAPFFGWQVQETLPSVQGALQAAVKAMTGADLRVHGAGRTDAGVHARGQVAHVDVDKQFPPGRFRDGLNAHLRPHPIAVLEAEIVPDSFEARFSAIKRHYRYRIVNTRANLALDVGHAWRVPRKLDADAMHAAAQRLLGKHDFTTFRDTECQAKSPEKTLDQLDVMRDGREITIVTSARSFLHSQVRSMVGSLVWVGEGRWSADDLSAALAARKRAACGIVAPPEGLYLMKVDY

SEQ ID NO: 15547 - protein, 311 aa, BradyrhizobiumColbertium
MPLRLIFMGTPDFSVPTLLELVAHGHEIVAVYTRAPKPGGRRGLQLQPTPVEDAARKLGVPVLTPKTLKTQEALDEFRALDADAAVVVAYGMILPQAILDAPKLGCYNLHASLLPRWRGAAPINRAIMAGDAESGVMVMKMDVGLDTGDVAMAERIAISDSMTARDLHDRLSRLGADLMVRAMAALERGGLQLRKQSEEGVTYAAKIEKAEARIDWSKPARAVLRHIHGLSPFPGAWSELANISENARVKILRCELAKGTGAPGEVLDDQLTIACGEGAIRILELQREGKARVQAADFLRGMPLKAGARFN

SEQ ID NO: 15548 - protein, 175 aa, BradyrhizobiumColbertium
MALREIIILPDKQLRLVSKPIEKVTTEIRKLADDMLETMYDAPGIGLAAIQVAQPLRLITMDLAKRDENGETKPLPRVFINPEIIASSEELSVYEEGCLSIPEYYEEVERPAKVRVRFTDLDGKVHEEDAEGLYATCIQHEIDHLNGVLFVDYLSKLKRDRVMKKFEKAAKRAAE

SEQ ID NO: 15549 - protein, 399 aa, BradyrhizobiumColbertium
MNEIIFMVGDWPVRTVDVLIGFGTLVLILLIVIAVVIARSGRRGAELAMANAIRADELEERLSEVLRAQSESSGRVDAMTQALAGRQAEMARAVNERLDSVTHRVGESMEHTTRNTMESLRALHERLGIIDNAHKNLTDLTTQVTTLRDVLANKQSRGAFGQARMEAIVQDGLPKGSYEFQFTLSTGKRPDCVVFLPDQRPLCIDAKFPLEAMTALHDARTDEERRVATQRLRGDVMKHVSDIAEKYLVAGETQEMALMFVPSESVYAEIHDGFDDVIQKAYRARVVLVSPSLLMLAIQVMQQIMKDARMRDAADQIRTEVIKLGDDLGRLRDRVLKLQKHFADVNEDVRQVLISADKIEKRAGRIEELDFSKSDAPEGPRLVATGAAELFPRKLQAGE

SEQ ID NO: 15550 - protein, 453 aa, BradyrhizobiumColbertium
MTAPDATSPAASTAPVASWRESLSVYLQPRVLIVLFLGFSSGLPLALSGSTLLVWMAEAGVDLGTIGLFALVGTPYTLKFLWAPLVDALHVPFFTRAFGRRRGWLVFSQLLLIGAILLLALTDPARSPLFVALGALLVATMSSTQDIVVDAFRVESLPESEQAAGMAAYVAAYRIGMLISTAGALFIVTGFETIVPRGAAWMWGYVVMAALVLIGTVTALAATEPPQSERAEAATQDEGAISRVLHAALGAFSEFLRRKEAWVVLAFVVLFKFTDAFSGNMTVPFVIDIGFTRNDYAVIVKGVGIVATLAGGFAGGFVARRYSLATSLWIGGIVQSMSNLSFTWLALVGVNEWALTLAITSDNFCNAIGTVIFVAYLSALCQNPLHTATQYALLTALAAVGRTYLSSGAGYLAKATGWPMFFAISVLVAIPSLMLLAYLQKRGHFETLEPARV

SEQ ID NO: 15551 - protein, 144 aa, BradyrhizobiumColbertium
MTTRFAKRLALVAMMMAVVTPAVSAQQDDGVPPPSKPGKPINTGDVLSGELNAMKVRDVKNGKRVATYQITTEPRRLPPPNGLCNLETGPETFQLVTSSDAQATQLKSFVGKEISVKVDEIACASDPGQMSEAVITKWSLIKKQ

SEQ ID NO: 15552 - protein, 200 aa, BradyrhizobiumColbertium
MSAVAGPEIERLVQLLARLPGLGPRSARRAALHLIKKREALMMPLASAMQVALDKVQVCKTCGNIDTQNPCTVCTDPKRDPSIIVVVADVADLWALERANATQGRYHVLGATLSPLDGVGPQDLTIDALVARAHDSQVHEIILALNATVDGQTTAHYITDLLQDANVKVTRLAHGVPVGGELDYLDEGTLSAAMRQRTLF

SEQ ID NO: 15553 - protein, 106 aa, BradyrhizobiumColbertium
MADFLGMMKQAAQLQSKMQEMQEQLANVEVEGISGGGLVAVRMTAKMDVKGVRIDPSLMKAEEREVLEDLLVTAFGDARRKAETAMQEKMQALTGGLGLPPGLFGQ

SEQ ID NO: 15554 - protein, 612 aa, BradyrhizobiumColbertium
MTDAGAPPNPDSAGQAGNAPYRVLARKYRPSSFDDLIGQEAVVRTVSNAFETGRIPQAWILTGVRGVGKTTTARILARALNYEMPDGSVKGPTIHMPTLGVHCQAIMESRHMDVLEMDAASHTGVDDVRQINDSVRYAPASARYKVYIIDEVHMLSTAAFNAFLKTLEEPPEHAKFVFATTEIRKVPVTVLSRCQRFDLRRVEADVLMKHLANIATKEGVEIEPEALGIIARAAEGSVRDSLSLLDQAIAHAAGQVKADAVRQMLGLADRTRVIDLFESLARGDIAAAFKEFRDQYDVGADPVVVLSDLAEFVNFVTRVKVIPAVADNVAYGETERVRAKEFASKISMRVLSRMWQMLLKGIAEVQAATRPAAAAEMVLVRIAYVADLPTPDEAIKMLEQNGGGSPVVNGGSAARSSAPSAPMSSAAPVSAAPVRMPTSSPSSFGGGGARPQMAAPAPDPQAAAPVLRVTSFTQLVALAGQKRDIMTKSALEGDMRLVRFEEGRLEVALEPNASKTMISELAKKFELWTGRRWTVIVSNEQGQPTLRSVNQAAKQEHARTAEADPRVQEVLSRFPGAKVVEVRRLAPEAPESNINADYGSDDPPDGSDGDDL

SEQ ID NO: 15555 - protein, 139 aa, BradyrhizobiumColbertium
MPEPAWSLHSRLKEDTIDIGDLPLSKVLVIKDAHYPWLLLVPRRPDAVEIIDLDEVQQAQLMTEISRVSRALKEITKCDKLNVAALGNLVPQLHVHIIARRTSDAAWPRPVWGVMPPLAHDATEVQNFISALRRKIWLG

SEQ ID NO: 15556 - protein, 312 aa, BradyrhizobiumColbertium
MSAFDAFPLGQPAFVTNVLDRAAHLRRDDEKLFAMEQKPSSRAYVVYRDSLLVKRDGDKVRALLSIDEALKCGANPGTVFLGLREGAAVFGMGMPQAAAEKLVGREDYTVTELRGMAMQGALPPQELSAIAMAKSMVGWHQRHGYCANCGARTAMKEGGWKRDCPACKAEHFPRTDPVVIMLVASGEKCLLGRQKQFPPGMYSCLAGFVEAAETIEDAVRREILEESGIRCTDVQYYMTQPWPYPSSLMIGCSARALNEDIVVDRMELEDARWFTREEAAKMLTRTHPDGLAGPHPFAIAHHLLGRWVHDKS

SEQ ID NO: 15557 - protein, 169 aa, BradyrhizobiumColbertium
MTDAAVQIPETSRRLDAIDRKILMVLQEDASLSVAEIGDRVGLSSTPCWKRIQRLEADGVIIKRVALVDQNKIGLGISVFVSVESSDHSEAWLKKFAEAVSAMPEVMEFYRMAGDVDYMLRVVVADMQAYDVFYKKLISAVPLKNVTSRFAMEKIKSVTALPIPAVVAA

SEQ ID NO: 15558 - protein, 450 aa, BradyrhizobiumColbertium
MMLRVTLAARLALIGLVGITLVITVVVAIFYRTTLRENELTRPSPARLDALATLLERTDAGSRQAVLDAVSSPQFTVRIVPSGAPVGGETPPEQQELRETYAAGLAGRPVEIVPPSNHRGSRVFPRLARLMANAIEFRIGLRSGELLIIDAYTRLPVSPFGLPVGFGAGLFGTIVALLALLVMQRETRPLARLAAAVDRVDLSADPLPLPDARRSAPEIRAVIAAFNRLQGRLAEMLRARMTLVGGIAHDVRTFATRLRLRVEHIPDDAERQRAVADIDDMIRLLDDALLSTRAGAGGLSQEMIELPALVAAEVHDRRVQGAAVELVCHERTRNVIVLGDRLALRRIFANIVDNALAYGRTAQVEIAMKDGALVVSIDDEGPGIPADQRHTVLEPFHRLEKSRNRATGGAGLGLAVVRNLVEAHGGTIEIGAAPSGGTRVNVTLPVFQLS

SEQ ID NO: 15559 - protein, 240 aa, BradyrhizobiumColbertium
MNAPSATILMVEDDPEISRLVADFMRREGFEVACVADGKSMDSMLQRLRPDIVILDLMLPGEDGLSICRRLRADDAIPILMLTAKSDEIDRVVGLEMGADDYLTKPFGPRELLARVRAILRRANGTPAKPLVRRYAFDRFVIDLDARSVETTEAETPELQLTSAEFDLLGCFVQRPRRVLTRDQILDWTRGRSAEPFDRTVDMLISRLRRKLDGASPGSNLITTVRNGGYLFTATVKQVS

SEQ ID NO: 15560 - protein, 73 aa, BradyrhizobiumColbertium
MTKLFLTSLVIGTLSVAAAADANAWTRSATASGPRGTSHVTATGSCAYGSCTRTVTRTGPAGNTYTRTGTVSR

SEQ ID NO: 15561 - protein, 105 aa, BradyrhizobiumColbertium
MPSIFRSLPQAATVVALGLATSTSVLAQTQLQTQITPQMRSEARTIVQACRTDLDRLCSSIAPGGGRIIACLQSHAGQLSSSCAQALPRAQALRNNAASAAAAPK

SEQ ID NO: 15562 - protein, 279 aa, BradyrhizobiumColbertium
MGYASLLLDPMLRQLILATALGLMLLEYGIGRLARHDTHDWRESAASFGVALGQSLLRAIEAGLLAVPFAFLYEHRLFDFAQTTPVALAGLFLGSEFLYYWQHRASHRIRWMWATHAVHHSTTRLNLTAAIRLGWTGNISGNFLFFLPLALIGFHPFAIVAMLGINLLYQFFIHSQFGPKLGVFEWVLNTPSHHRVHHACNEPCLDKNYGGILIVFDRLFGTFAEHPSDQPLRFGLVGGVQSFNPIRIALGEWIAMLDDAWRAPGAGAKLRALFGPPGG

SEQ ID NO: 15563 - protein, 499 aa, BradyrhizobiumColbertium
MFPKPKSVLLPNTYAFESEPMVKPTGFREYDARWLFQKEINLMGVQALGMGLGALIAELGVRQEIVTGHDFRGYSASIKYALISGLMAAGCKVHDIGLAVTPMAYFAQFDLDVPCVAMVTASHNDNGWTGVKMGANRPLTFGPDEMTRLKEIVLNAEFKNKAGGSYQFHENYPARYIADLTSRPKLTRKLKVVAACGNGTAGAFAPQVLEAIGCEVIPLDTELDHTFPKYNPNPEDMEMLHAIRDAVLHHNADVGLGFDGDGDRCGVVDNTGEEIFADKVGVMLARDMSAIHKDAQFIVDVKSTGLFITDPVLQEQGARTAYWKTGHSYMKRRTNETGALAGFEKSGHFFFNKPYGRGYDDGLVSAIAICDMLDRAPGKSMADLKNALPKTWSSPTMSPHCADEVKYGVIDKVVKHFEGLQESGAKIGGQAIRDLVTVNGVRVTVEDGSWGLVRASSNKPELVVVVESPVSEQRMHDMFEMVNSVLRTHPEVGEYNQKI

SEQ ID NO: 15564 - protein, 166 aa, BradyrhizobiumColbertium
MIIAAVMIGLGTFMAQMADKMSSASATSVPRTTVAVAATEPAGGRSISIPRDGRGHFQTEGRVDGQRIGFMIDTGASVVALNESSAARFGLRPSRSDYNATVSTANGTIKAARTRIAMLEVGGLVVRDVDAMVLPDAALSENLLGLSFLSRLKRFEYANGQMVLEQ

SEQ ID NO: 15565 - protein, 824 aa, BradyrhizobiumColbertium
MPRSFATPLPIDAVLDDLSRTLETNNAAVLVAPPGAGKTTRVPLALLDAHWAKDKKIIVLEPRRIAARASADRMAKSLGERTGETVGYCVRFGSRISRATRIEVVTEGIFTRQILDDPELTGVAAILFDEFHERSLDADLGLALARDAQTGLREDLRILVMSATLDGARVARLLGDAPVVESEGRAFPVETRYLGRKADAPIERQMADAIASALRADSGSVLAFLPGAAEIRRTQNFLGERVQDAAIEIVPLFGALDAAVQDRAIAPAPTGTRKVVLATSIAETSLTIEGVRIVVDSGLARVPRYEPDIGLTRLETVRASRAAVDQRRGRAGRTEPGVCYRLWDEPQTASLAPYTQPEILSADLSSLVLDLAQWGVSDPATLSFLDPPPQPAWKEAKSLLTELNALDVDGRITAEGKSLRALALPPRLARMIVDSHRAGSGEAAAEIAAIITERGLGGDSVDLEHRRDQFRRDRSPRAASARDLARRWASQVAVSEKAGPQEDLSTGLMLAYAFPDRVARNRGNGSFVLANGRGASVEQTSSLARAPYIAIGEMTGTAASGRILLAAQITQDEIENHFAEHIETTDEISFDRGAMALRARRKRVLHAITLSEATLAVSPSEDTARIFADGLIAAGLDRLPWSKAAKQWRDRVTFLRKAEGDSWPDVSDSGLIARREDWLVPALYDKIALKDVSAGDLSDALMSLLPWDMRARLDREAPTHFEAPTGSVLAIDYEAEQGPTIAVRLQELFGLNTHPSIAAGKVPLVLELLSPAQRPVQVTRDLPGFWRGSYAAVRSDLRGRYPRHPWPDDPANALPTRRAKPRGT

SEQ ID NO: 15566 - protein, 438 aa, BradyrhizobiumColbertium
MRIAMIGTGYVGLVSGACFADFGHDVICVDKDEKKIAALHRGEIPIYEPGLDELVANNVRAKRLDFTTDLTKPVADADAVFIAVGTPSRRGDGHADLSYVYAAAKEIAQSLQGFTVVVTKSTVPVGTGDEVERIIREANPKADVVVASNPEFLREGAAIRDFKFPDRIVVGTSDERGRKVMGDIYRPLSLNQAPLMFTARRTAEMIKYAANAFLATKITFINEIADLSEKAGANVQEVARGIGLDNRIGTKFLHAGPGFGGSCFPKDTKALIKIAQDYDVNLRIVESVLAVNENRKRAMARKVSQALGGSLRGKTIAVLGLTFKPDTDDMRDAPSIPLVTGLIDMGAKVKAFDPVGMEQAKGELPNITYCEDAYSCAQGADALVIVTEWVQFRALDLDRLKATMAQPVIVDLRNIYRPEDMEAAGFTYESVGRPPVQG

SEQ ID NO: 15567 - protein, 354 aa, BradyrhizobiumColbertium
MTRSGTIGGAGLTASSAARVDWVDYAKGICIVMVVMMHSVLGVELAAGQTGFMHVAVAFAKPFRMPDFFLISGLFLSLVINRDWRTYLDRKVVHFAYFYVVWVTIQFGFKAPAFAAETGWPAVGVLYLESFIEPFGTLWFIYLLPIFFVVTKLTRKAPPLAIWLLAAALETARINTGWTVIDEFCSRFVYFYSGYLFAPYVFALSDRARSHPGLALAALAIWALVNAGLVAWGASEWAIVSLVLGFAGACAIIATGTLLARAQWLSFLRFCGEHSIVIYLAFFLPMAATRTLLLRTGVIPDIGTVSLIVTIAGVLGALAIWRVALRFNVRFLFERPDAFWIAPKKVGVRLQPAE

SEQ ID NO: 15568 - protein, 1043 aa, BradyrhizobiumColbertium
MPAKIHTLRPMPKTSPETSPKTSPKTSAKADTKAASKVAADTKPAATAPAKPVASKAAGKGDHVFLVDGSSYIFRAYHALPPLNRKSDGLQVNAVLGFCNMLWKLLREMPEDNRPTHLAIVFDKSEITFRNKIYPDYKAHRPPAPDDLIPQFALIREAVRAFDLPCLEQTGFEADDLIATYVRQACERGASATIVSSDKDLMQLVTDCVTMYDTMKDRRIGIPEVIEKFGVPPNKVVEVQALAGDSTDNVPGVPGIGIKTAAQLITEYGDLDQLLFRAGEIKQPKRREALLENAEKARISRQLVLLDDKVDLEVPLDDLAVHEPDARKLIAFLKAMEFTTLTRRVAEYAQIDPANVDADPGYASGASVFTTLPPSDVVPAPGTGTPARARPNEPNKSAGKEDKAASLKGAPISLAAAREEALRKLPVDRSKYQTIKTLKELNAFIARVHDAGQVAIETRANSIDPMQADLCGIALALAPNDACYVPLAHKQSGGGAGLFDAGLAPDQIRHTDAIEALRPVLESSGILKIGFDVKFTAVMLAQHGITLRNIDDALLISYVLDAGRGSHALVSLSERWFGHAMLKESELLGSGKGKITFDQVPIDKAAPLSAEGVDVALRVWRVLKPRLVAEHMTAVYETLERPLVSVLARMERRGISIDRQVLSRLSGDFAQTAARVEAEIQEIAGEPVNVGSPKQIGDILFGKMSLPGGTKTKTGAWSTTAQVLDELAEQGHDFPKKILEWRQVSKLKSTYTDALPTYVNPQTHRVHTTYALAATTTGRLSSNEPNLQNIPVRTEDGRKIRRAFIATPGHKLVSADYSQIELRLLAEIADIPVLKQAFRDGLDIHAMTASEMFGVPIKGMPSEIRRRAKAINFGIIYGISAFGLANQLGIAREEASAYIKKYFERFPGIRAYMDETRDFCRSHGYVTTLFGRKCHYPDIKASNASVRAFNERAAINARLQGTAADIIRRAMTRVEDALAEKRLSAQMLLQVHDELIFEVPDAEVEATLPVVQRVMQDAPFPAVLLSVPLHVDARAANNWDEAH

SEQ ID NO: 15569 - protein, 211 aa, BradyrhizobiumColbertium
MPHTHSLLGFALVCLGLVLTPGPNMIYLISRSITQGAAAGIVSLGGVALGFVFYMLCAAFGITALLLAIPFAYDALRFAGAAYLLWLAWQAVKPGGRSPFQVRKLAVDSPRKLFAMGFVTNLLNPKIAMLYLALLPQFIDPSAGSVLAQSLVLGAIQIAISVSVNAMIALAAGSIALFLATRPSWMLVQRWLMGTVLAGLAVRMAVEAKKV

SEQ ID NO: 15570 - protein, 208 aa, BradyrhizobiumColbertium
MTIELYTWNTPNGRKISVALEEMGLPYKVIPVNITKGEQMAPEFLKLSPNNKIPAIVDPEGPDGKPVSIFESGAILLYLGEKTGKFLPKSLGGRIPVYEWLMWQMGGFGPMPGQVHHFIALENEQDRAYGLKRYMAETRRLYGVLDRQLEGREFVAGELSVADFAILGWAWRHPRHKVDLADFPNVKRWYEALMARPAVKRGMEAKLD

SEQ ID NO: 15571 - protein, 187 aa, BradyrhizobiumColbertium
MSKSASRARLFEIIRRRSFGRGEVTLASGRKSDFYFNLKPTMLDPEGATLLAELTYEALKDEQLDFIGGLEMGAVPLAGALAQISWIKGHPIAAFFVRKKPKEHGAKLAIEGLPKGETLAGKRVVIVEDVTTTGGSAMKAVESVREAGAKVVLVLTMVDREEGATDTFGAAGLPFRSLYKASEFLKG

SEQ ID NO: 15572 - protein, 258 aa, BradyrhizobiumColbertium
MLVAATLAAPLLAVPAPVSAEGLFDFLFGGMPQQRPQREVPQQANSYADPFTGQQNGATPQYVPPTRSAAAGGSGPAFCVRSCDGKYFPLMRGLVSPAQMCQAFCPASATKVYFGSSIEGAYSQTGERYADSENAFAYRKALRADCTCNGREPVGLAPVDLALDSSLKAGDVIATTDGLVAYTGIRVGNDQAADFTPVASYPGLTAQVRARLGEMKVAPVRAETVSADAPAAAEIVREPLPDVSVPKTQKPAKRAGLD

SEQ ID NO: 15573 - protein, 143 aa, BradyrhizobiumColbertium
MSTIAFDQFALTRIADFARSLSRLHQAARRHAVDDDQFDREFNAVCQSIWGYTIDDISDDLFSTEDHLFLDTLDEAHARIFAAEQGYDLVGDQGMLTDWWGFCWMILAEKRGLLTPENRAAARVAIEEKYLAAPNVIGVIIGR

SEQ ID NO: 15574 - protein, 232 aa, BradyrhizobiumColbertium
MTDNVALSLSSALALDIAGVSLQADLSGALFWEEQRLLVVSDLHLEKGSSFATRGVLLPPYDTIATLSRLAAVISRHNPQVIVALGDSFHDRSAHGRLSAEDRDTVAALQAGRDWIWISGNHDPMLPPDLGGTVADEVAIGPITFRHEPTGSDGEIAGHLHPKARVSARGRSLERRCFASDGMRAVMPAFGAYAGGLSIRDAAFAKIFPKNGFVAHLLGDRRVHAIAASRCY

SEQ ID NO: 15575 - protein, 858 aa, BradyrhizobiumColbertium
MPPRILQKSVETPALLPDRFQRWFAARGWSPRAHQLALLEKAREDASALLIAPTGAGKTLAGFLPTLVELSIDPIEREASTKQSLVSTGRGLQRTGGLHTLYISPLKALAVDIARNLERPIAEMGLPIKVETRTGDTPVSRRQRQRRYPPDVLLTTPEQLALLLSSDDAPFLFSSLKRIVLDELHALVTSKRGDLLSLGLARLWRLAPQMRAIGLSATVAEPDQLARFLVPQPDGTEAAADIVVAGGAAPPVVEMLDTRERLPWAGHSAWRALPEIYELIKANKTTLVFVNTRSQAEMLFQNLWSMNDDGLAIALHHGSLDVAQRRKVEDAMSAGRLRGVVCTSSLDLGVDWGDVDLVVNIGAPKGSSRLMQRIGRANHRLDEASRAVLVPANRFEVLECRVAIDAIAENAQDTPPLRTGALDVLAQHVLGCACGEPFLSDKLYAEVRTAAPYAGLSRQDFDDVIDFVASGGYALKTYERFARIKQDKEGHWRVANPKVRQSYRMNVGTIVEDDMLKVRLVRSRGGGAGSTGVIARGGRLLGEIEEAFIEGLSPGDTFVFSGEVVRYETLVEDQVYVSRAHDKDPKVPSYMGGKFPLSTYLAERVRRLLDDGRAWGGLPEQVRDWLSLQKDVSRVPAVRELLVESFPRANKHYLVCYPFEGRLAHQTLGMLLTRRLERARARPLGFVANEYAVAIWALGDMSFMIRDGRIDLDALFDPDMLGDDLEAWLAESALMKRTFRNCAIISGLIARRHTGEEKSRRQVLFSTDLVYDVLRKHQADHVLLRAARADAATGLLDLRRLSDMLMRIHGRITHRELDRVSPLAVPVMLEIGRESVYGEAADELLAEAADELVKEAMS

SEQ ID NO: 15576 - protein, 121 aa, BradyrhizobiumColbertium
MTDHTAIALCYIDVWNERMASRRRELLSETWTADASYVDPVMKGDGRDGIEALIAGVQQRFPDFKFKLIGEPNGYGDHIRFSWGLGPDGADSPIKGTDFAVLRDGRIKSVIGFLDQVPAEV

SEQ ID NO: 15577 - protein, 116 aa, BradyrhizobiumColbertium
MSIQRFETGPRMSQVVVHGNTVYLAGVVANKAAGESVTKQTQDILATIDAHLAKAGTDKSKLLSATIYITDMKTFGEMNAVWDAWVSPGNTPARATVEAKLAAPQYTVEIMVTAAK

SEQ ID NO: 15578 - protein, 297 aa, BradyrhizobiumColbertium
MFLAALIAASAASAETIDVNGVKRSYTAQLPGKRLVPLVVVLHGKSRRGADMIARTTWPQVAKREGLAVVFPDGLNNAWADARTKAGPALRGPPAGTDDVAFIAKIVDKLVADGTADAKRVFIAGVSNGGAMAMTMACARADLFAAAASVIMNLTDEAAVTCHPSRPLPMLLMNGTADLLVPYAGGRGTSYFAADGFWSTDETLAFWRRLNGCEVEDAETTDLPDRAPADHSTVTRISSRCPQGHDVVLYRVNSGGHRVPGFVPDARFPKIAAGLLGPQNIDIDGAETIWTFFSSFP

SEQ ID NO: 15579 - protein, 552 aa, BradyrhizobiumColbertium
MAEETDVIVVGAGLSGLVAATEIADAGKRVIVVDQEGEQSIGGQAFWSFGGLFLVDSPEQRRLGIKDSIELAMQDWLGTAGFDRDEDFWPRKWAEAYVAFAAGEKRDWLRAMGHRIFPVVGWAERGGYDAMGHGNSVPRFHVTWGTGPGIVEPFARRAREAMNSGRLLFRFRHRVDALSITNGTVDGVSGTVLAPDPIDRGKSSSRNATGEFALKAQAVIVASGGIGGNHELVRQNWPKRLGDPPKFMISGVPEHVDGRMIGITEKSGARLINRDRMWHYVEGIQNWSPIWPRHGIRILPGPSSMWFDATGKRLPAPLLPGSDTLGQLKYIMSTGYDYSWFILTQSIIKKEFALSGSEQNPDLTGKSWRMTLRRATNKGAPAPVEAFKSHGVDFIVRDKLDELVAAMNKLAGSDLLKLEHIKMQIEARDREIANPYVKDAQVMNIHNARRYIGDRLIRTAPPHRILDPAHGPLIAVKLNILTRKTLGGFETDLDSRVFGEEGSVIPGLYAVGEAAGFGGGGMHGYRSLEGTFLGGCLFSGRKAGRAASKAVG

SEQ ID NO: 15580 - protein, 173 aa, BradyrhizobiumColbertium
MKFLTGLLASVLLMAGMGASHAVVRIADDRGGRIGTYVDKYQDLRQSGETVIIDGLCASACTIVLGAIPHDRICVTSHATLGFHAAWDFGANGRAVTNPEATQMLYAMYPSQVRRWIGQRGGLTHRMLFLKGKQLEAMYKPCYLDAQASTAKPSRRSLPQTEPLESARGQLLR

SEQ ID NO: 15581 - protein, 41 aa, BradyrhizobiumColbertium
MLVWGGTAVGGLVVIGALALWFHYGSHVFFEMIRTGLAACF

SEQ ID NO: 15582 - protein, 196 aa, BradyrhizobiumColbertium
MSSATRALVIATAFAASLIVGLLIMFWAMGGVGKMAQPAAIGGPFQLTDQNGKAVTDKSLKGKPTLIFFGYTHCPDVCPTSLFEISEVLRVMGKDADKINAVFISVDPERDKPATMKDYLSSFDPHLQGLSGDPAETAKVISSYRVYAKKVPTKDGDYTMDHTALIYLMDREGRFVSPFNLKRTPEEAAADLKKYL

SEQ ID NO: 15583 - protein, 307 aa, BradyrhizobiumColbertium
MAPSQQAKSSKSARGLLTGLAVAACLLASLPAAEAQAPAKRPPAAPQAAPQAAPQAVPGFWDPRRRPERPDLSRLTVIRFLTETDYPPFNFTGADGNPAGFNVDFARALCEEIKVTCTVQMRRFETLVDALTSNRGDAIIASMAVSPQLRARVDFTDPYYRVPARFVSRKDAVMPEIRPEYLEGKKVGVIAGSAHEAYLKAMFTDAELHAYPGDDAVRAALRRGEVDFIFGDAISLAFWINGTDSGDCCAFSGGPFVESRFFGEGIGIAVRKGNDVLRQALNWAMFRVWEKGRYTDLWLRYFSVSPF

SEQ ID NO: 15584 - protein, 546 aa, BradyrhizobiumColbertium
MSVIDLAANPSDLRALAEQSNAWPFEQAKAIVARLKKSPKDEVLFETGYGPSGLPHIGTFGEVARTSMVRHAFRVLTEDKVKTRLLAFSDDMDGLRKVPDNVQNRAPLEANLGKPLTRVPDPFGTHDSFGAHNNARLRAFLDHFGFDYEFASSTDYYTSGRFDATLLKMLAAYDKIMAIILPTLGPDRRATYSPFLPISKTTGVVLQVPMIRRDVAAGTVTYVDPDTNQEVETPVTGGNVKCQWKADWAMRWVALGVDYEMAGKDLIDSVKLSGAIARALGGTPPEGFNYELFLDEKGQKISKSKGNGLTIDEWLRYASPESLSLFMYREPKAAKRLYFDVIPRNVDDYQQFIDGFAKQDAKQQLGNPVWHIHNGRPPKGDMPVTFQLLLTLVSSSNAENAETLWGFIGRYRPGVSPQTHPKLDAMVGYAINYYRDFVAPTKQFRVPTDTERAALQDLRDALSQLAPNASAEDIQNVVYEVGRREPFLDQVKKGKDGRPGVTLDWFNMLYQVLLGQEKGPRFGSFVAVYGIQNAINMIDGALARSA

SEQ ID NO: 15585 - protein, 218 aa, BradyrhizobiumColbertium
MVRQAKAQRMLTHHQIWAALDRLAARAGLSPSGLAKRAGLDPTTFNRSKRVTVDGRERWPSTESIAKALAAADASIDSFAKLIDDGGVSDRGSVPLLGLAQAGTGGAFDGAGLPSGRGWTEIALPIAEDGQVFALEISGAALLPAYRNGDIILVSPAAPIRKGDRVVVKIKTGEITIATLKRRTAKALDLAPFDASQAARRVASSDVAWIARILWASQ

SEQ ID NO: 15586 - protein, 114 aa, BradyrhizobiumColbertium
MVKIYKICPASAWREAERQGVYRGSADDARDGFIHFSTAGQVPETLRKHYFGQRALFLVEVDGDALGSELRWERSRNDELFPHLYGELDLGTVVTVINLTMRSDGSHDVPELLP

SEQ ID NO: 15587 - protein, 365 aa, BradyrhizobiumColbertium
MIRAFDAFSLPVLRWFDPEDAHRLAIQGLRFLPPIKPRPDDPKLAVRAFGLNFPNPVGMAAGFDKSAEVPDALLRLGFGFVEIGSVTPKPQEGNPRPRLFRLERDEAIINRMGFNNDGAEAALRRLAARAQHGGIVGVNVGANKDSPDRVADYVKLIETFAPVASYFTVNVSSPNTPGLRNLQEGALLDELLARVIDARERVRQKAGDTPVLLKIAPDLSLAQLDDVVQVARSRRVDGMIVSNTTIARPSTLREQARAKEQGGLSGRPLFRLSTRMVAETYVRVEGAFPLIGVGGVDSGGAALTKIRAGASLIQLYSSLVYKGLGLVDEIKRDLTSTLLRTGRDSLSEIVGADAATLTAEDWPGM

SEQ ID NO: 15588 - protein, 428 aa, BradyrhizobiumColbertium
MFAIAGPAMVANLTTPLIGVVSTTAIGRLDDAALLGGVAMASIIFDCLFWLFGFLRMSTLAFTAQALGAGVTEELNAILVRGFIVAGLIGTGLIALQLPLTSVLFDLMGGSEGVTRAAKTYFMIRIWSSPFAFANYVVLGWLIGQARANPALALQVVINLINMAATILLVLVYDTGIAGAAIAALLSETTGFVLGVIVCRRYAVGGFAVPRARLFDRVKLMRLLAVNSDIMIRTAALIVVFLFFTAKGARAGDVTLAANSVLNNFLLVSAFFLDGIGNAAQQLCGRTLGARDAKGFLDSTRLVLLWGLGFALVVALLFALFGPGLINFMTASEDVRRAAREFLPFIVLAPLPGVFAFGFDGIYVGATWAREMRNLMLVSLAIFFGVWLALQSLGNAGLWSALIAFYVARGGLQGARYPALYRATFPKS

SEQ ID NO: 15589 - protein, 244 aa, BradyrhizobiumColbertium
MQLRFVGCGDAFGSGGRLNTCFHVSGRAANFLIDCGASALPALKRLEIVREDIDLILITHFHGDHFAGLPFLLLDAQFSRRTRPLTVAGPQGIETRLREVMEALFEHSSKTRQRFELNLVELAPEQRRAFGAITVTPYPVVHGESGGPFLAYRVEAEGRTLAYSADTEWTETLIPLAHGADLFIAEAYMYEKVVKNHLSLKTLEQHLPAIGAKRLVLTHMSDDMLSRLGDVPHLAAEDGMVLVF

SEQ ID NO: 15590 - protein, 101 aa, BradyrhizobiumColbertium
MVQDVRDLPAGRSDGLHRFLGGSPLTVAFRLVMLSILVGVVLAAIGFDPWNIIYSIQLLFQRLWDLGFDTINWLWRYFLLGAVIVIPIWLLSRVFGAPRGR

SEQ ID NO: 15591 - protein, 553 aa, BradyrhizobiumColbertium
MNRFAELLDRLAYEPGRNNKLRLITGYFREVSDPDRGYALAALTGALSFKHAKPALIRDLIAARTDEVLFGLSYDYVGDLSETVALMWPKAPSAAHNNPPPPTLTEVVTTLRTLGKTELPKQLERWLDELDETGRWALLKLVTGSLRIGISARLAKTAAAALGDKDPHEVELIWPGLAPPYLDLFAWLEGRAEKPVNRDPAPFRPVMLAHAIEDTDFAALDPADYIAEWKWDGIRVQAVAGRDDRGHITGRLYSRTGEDITGSFPDLVPSLRLPGAIDGELLILREGRVQSFNVLQQRLNRKVVSPKLIKEFPIHLRAYDLLGDDENDLRELPFAERRERLETFIAKLDDPRIDLSPTVRFASWEALTAARADPASAGAGEDADAVEGVMLKRRDAPYLPGRPKGQWWKWKRDPHIIDAVLMYAQRGHGKRSSYYSDYTFGVWTGGNGGDELVPVGKAYFGFTDEELLQIARFVRRNTTEKFGPVRHVVHEPDKGLVLEVAFEGLQRSPRHKSGVAMRFPRISRLRWDKPPREADRLETLEGMLKAEPAEIDL

SEQ ID NO: 15592 - protein, 348 aa, BradyrhizobiumColbertium
MSHMRPQDILLPNAAGLCCKPGGFHIDPVRPVNRAVITHGHSDHARAGHGAVLATQETLDMMRLRYGENFAGSTQAIRYGEEIRLGDVCVKFHPAGHVLGSAQIAVICKDTCIVASGDYKDAPDPTCTPFELVPCDVFITEATFGLPVFRHGDAADEVKKLLASVALFPERAHLVGAYSLGKAQRVIALLRRSGYDAPIYLHGAMEKITEYYQSRGIELGELRPVKGMKKAALAGTITLAPPSATSDIWTRRFPDPVTAFASGWMRVRARARQRGVELPLVISDHADWDGLTATIGATGAGEVWVTHGQEDALVHWCRSRGLKAQPLDLVGYGDEEESEVPIPGEAEA

SEQ ID NO: 15593 - protein, 308 aa, BradyrhizobiumColbertium
MPLRLFQSSGDLMADRRFEFARDLQLKGDLPAAADVLEQAIELAPDFTSAWFTLGEIRMQLGERDKAIAAFQESRRCDPEDQHGAGLHLIRLGDAPLSEMPKAYVQALFDQYAPRFEHVLVNDLGYRAPALIFKAVLAARVAAKKPAYFKRTIDLGCGTGLAAAAFAKQVDHFIGIDLSPGMIKEARATNLYAELEVADMIDGLRAKADASANLVVAADAFVYLSDLAPVLNEARRVLVPGGVIAFTLETHDGSGIVLGAGLRYAHSAEYVRDAIARADLKLLTLEPASPRNENNEPVRGLVVVAEKT

SEQ ID NO: 15594 - protein, 409 aa, BradyrhizobiumColbertium
MTKNPSRRDFSAAALATIAASTLPAPYVWAAEKKYDAGASDTEIKIGQTVPHSGPGSLYGVLGRIGEAYFQMLNEKGGINGRKIKFLTMDDAYSAPKCVEATRRLVEQEEVLALYGSLGTAPQTAVHKYLNSKGVPQLLLNTGASKWNNPKEFKWTMAGLPLYPTEARILARHVVSVKPNAKIGILYQNDDFGRDFLAPFKKVLADAGGTAQVIMEQTYDLTEPTVDSQLINLSKSGADVFYNISTGKASSQSIRKVAELGWKPLQLLSAGSTGRSILSAAGLENAAGIVAIRYNKEVGLPKWEKDPDVMAFEELRKKYTPAIDPDNTIAFAGYGQAATMAEILRRCGDELTRANVLKHASTLAGFHSPYFLDGVTYSYTPENYTPMKTLFISTFTGKDWDISDKPMSE

SEQ ID NO: 15595 - protein, 283 aa, BradyrhizobiumColbertium
MIIDAHQHFWDPARADYPWMDAPELAPIRRAFGPADLAPLLKANGLDASILVQCRSALEETEEFLRIAHATPSVIGVVGWADLTDGALDETLDRLRALPGGGKLAGVRHQVHDEADPEWLLREDVQRGLTAVFAHDLAYDFLVRTRELPSAIATAQAFPEARFVLDHAAKPPIAAGGSAEWADLIRALAACGNVWCKISGLATEAVWTDWDAERLLPFVAHAAECFGEDRLIFGSDWPVCLLAGSYGRIKTALEDCLMGLGPRVRDKAFGVNATRAYRLAIAG

SEQ ID NO: 15596 - protein, 325 aa, BradyrhizobiumColbertium
MKWSRLGALDVTSIGLGSAPLGGLFSPVSDADAQATIERAWSLGVRFFDTAPLYGFGLAERRLGAFLRQQPRESYVISTKVGRLLRAPDGAPAEDEHYKGTPRERPVFDFSHDGVMRSVEESLERLGLDRIDVLLVHDPDDHYDDAVTGAFRALQRLRENGTVKAIGAGMNQSEMLVRFAEAVPVDCFLLAGRYTLLDQGALDALFPLCQAKHIGILLGGLYNSGILANPTTSAKFNYQDADAALLARALELDALCRKHGTELKAAALQFCMAHPAVTVAVMGARNAGEVADNMAMTEKAVPAAFWQELRARKLVDVRAPLPGGA

SEQ ID NO: 15597 - protein, 310 aa, BradyrhizobiumColbertium
MRKLLLAGIAVAMMATPTFAANYRFVIVPKAMNNPFFDFARDGCLKRAKELGNIECIYKGPVEHEPATQAQIIQDFITQKVDGLAISVADVAAMTKSIEAATAAGIPVITFDADAPGSKRIAYIGTNNKEFGVALGKQLLKMRPDGGKYAMVSGGPGAKNLAERVDGVREALKGSKWTEVAGSPTFCNDDPALAVQQMTDMRTATPDLAAIVPIGGWPMFAPEGFKAFASRNKKDIDSGKFTLVVADTLKMQLELLRDGYANALIGQRPFEMGEKAMDALLAIKKGEKVPEIVYTGLDLVTKDNVAQMLK

SEQ ID NO: 15598 - protein, 360 aa, BradyrhizobiumColbertium
MAMPMESPITFTNVGKIKWWQRGLFASQTGYVLLALAVLLLVMHFASPYFFTQGNMQNVAKNFSFIAIATLGVTFVIITGGIDLSIGSMMCFSAMITSMVMTELSMPGSPAGSLFVHMASDGKTVLANAPGLILLVSFLAGLGAALVVGLVNGFCIAVLGLSPFVTTLGMLSIVRGLGYVVSNGRGSFPGGPDADYFYAATSGDVFGVPAPFIYLVMLALAMAVVLHHTSFGRHVFALGGNEKAAELTGIPVVRVKIEVYVICALAAGLQGIIISGWLGSAPANMATSYELNVIAAAVIGGANLAGGIGGPLGAIVGCVLLEVIRNGLVLAQVSSYWQQTLVGVIIILAVLVDRIRSRVS

SEQ ID NO: 15599 - protein, 252 aa, BradyrhizobiumColbertium
MTKPDATPALELTGIGKEFGAIRALHDVDMQIRSGEVVGLMGDNGAGKSTLVKIIAGNFRPSHGEIRLAGNAVHFNRPVDARAVGIEVVYQDLALADNLTAAANVFLGRELKRRFGPFALLDHKAMAARALELFGELRSETRPDDLVKQMSGGQRQAVAIARTRLSNARLVMMDEPTAAISVRQVEQVLSLIRRLKEQGVAVMLISHRMPDVFAVCDRVIVMRRGEKRADKPIHQTSPEEVTALITGAKEAA

SEQ ID NO: 15600 - protein, 440 aa, BradyrhizobiumColbertium
MNAPAKFFDVSAPVAFGGKDAEGAPAFRWYDKDRLVHGRRLEDHMRFAVCYWHSLCWPGGDPFGGETFLRPWQHGTDPMAMARAKADVAFELFRLLDVPFFTFHDVDAAPEGASLAESVANLNAIADLFEQKMASSKVRLLWGTANLFTHRRYMAGAATNPDPEIFTYAAGQVRAALEVTHRLGGQNYVLWGGREGYETLLNTDLKRELDQLGRFISLVVEHKHKIGFKGPILIEPKPKEPTKHQYDFDAATCYGFLERYDLLKDVKLNIEQNHAILAGHSFHHEVALAEALGVFGSLDINRGDDLLGWDTDQFAMNVPELALVFHEILNRGGFTTGGLNFDAKIRRQSIDPDDLIYAHVGSMDACARAFLAAADMLDAGTLTAPLATRYAGWACPEGRAILAGQRSLADLADRALSPGFDPQPRSGRQEYMESLVNRYV

SEQ ID NO: 15601 - protein, 484 aa, BradyrhizobiumColbertium
MYLGIDIGTSGVKAVLVSEAGAVVATASRELALSHPAPLWSEQDPDAWVEAAVGAVDDLAAHHPHDVAQVRGIGLSGQMHGATLLGQDGRPLRPAILWNDGRSQAECVALERRCPSLHAIAGNLAMPGFTAPKLLWVARHEPKIFDRLAKVLLPKAYVRYRLTGEMVEDMSDAAGTLWLDVGLRRWSALLLHATGLDLHHMPRLVEGSAASAVLAPDYVQRWGMQKNVAVAGGAGDNAASAIGLGAIAPGDAFFSLGTSGVLFRVTDRFAPAPALAVHAFCHALPGLWHQMGVMLSAAASLAWLAGVMETQPAALLTRLGERVDGPSPVKFLPYLDGERTPHNDAAASGAFVGLRGATGRGQIVQAVLEGVAFAARDNLAALSAASGPIAELDLVGGGSRSPLWAQICADVLGIPVHRVEEGEVGAALGAARLGRLAATGEDPADVCTRPRRLASFTPRPFVAAAYDEAYRRWRALYPALKESS

SEQ ID NO: 15602 - protein, 356 aa, BradyrhizobiumColbertium
MADTLTPTALTLKDIAREAGVSLATVDRVLHNRPGVRPDTVRRVKEAIARNSFQPHVAAAELARGRARRFAFVMPSGPNPFMQQIEAYLGEMAAWLSARRLKVEMVATDVFEPAALAASLEALSGDYDGVAVVALDHPSVRAAINDLVDAGTKVVTLVSDVPSSRRHHYVGIDNIAAGRTAGALIGRLVGQRSGKVAIVAGSQGLRDHAERIFGFNQVMATEFPDLSVLPVLEGRDEDERSEQMLARLFGGHADIVGLYNVGAGTQGVAKALNDKALNDKALSETGRDKVVFVGHDVTALTRRLLLQGLMDAAISQNPGHEARAAVRVLLALARGEPILSEQEKIRIDIVMRDNLP

SEQ ID NO: 15603 - protein, 175 aa, BradyrhizobiumColbertium
MRSDITHHSSEGLSPTLERNIQALVKRRRREQQAARGQDKVADAVTTFTGSMTFVCLHLAVFGFWIIANLHWIPGLPAWDESFVVLAMIASVEAIFLSTFVLISQNRMTAAADKRADLDLQISLLAEHELTKVARLLTQIAERLDVKPESERDMEEAARDIAPERVLDKIEETRS

SEQ ID NO: 15604 - protein, 157 aa, BradyrhizobiumColbertium
MQIRTGDTYDPRVIALLDHHVTAARAQTAPGSAHALDLAGLRAPDIAFWTGWDGEALVATGALKTLSSDHGEVKSMHTLQTTRRRGFGSQMLRHIITEARARGMTRLSLETGSWDYFKPAHALYQAHGFVICGPFEGYVEDPNSLFLTLDLSAPAHR

SEQ ID NO: 15605 - protein, 193 aa, BradyrhizobiumColbertium
MDQQKLDRAIGRRLKTLRTQAGMTLNELAGRSGVSRAMIGRVERAQSSATAALLGKLCAALDVSLSDVVALAEKPPERLVRLADQPHWRDPESGYRRRHASPTDAASGIEIIVVDLPAGARVPYSPWGRNAFTQQLLMLQGAIAVHIDAKAVRLREGDCLDFDVMRAVIFENETRQDARYIIITRRGAAYGKM

SEQ ID NO: 15606 - protein, 192 aa, BradyrhizobiumColbertium
MVERAYAIFDTALGRCGIIWSSTGVIAVQLPEAREIDTRRRIFQVHPEAREQRPSENAELAIEGITGLLQGSDPDFSDVSLDAGGVPGFNQRVYEFVCTIPRGETRTYAEVAKALGASGAVYSVAQAIAKNPFMLIVPCHRVLEAGNYTDRLSPYGGVISKRRLLALEGAHPLASKTLFDVLLPVAPPRAST

SEQ ID NO: 15607 - protein, 279 aa, BradyrhizobiumColbertium
MDATALLTTPSMTVFEFRCDAGPDDTPFEECRTGHSIAYVRSGSFGCHCRAGFFELVAGSMLIGAPGQEYTCTHEHVSGDVCLSFFLSEHLVDSLGGQRKVWQVGATPPLPELMVLGELAQTAADGNSDIGLDEVGQILAGRFVDVASGKTRKPATPTARDRRRAVEAALWIDDNSHAELDLEQAAKQAGLSPFHFLRLFSSVLGVTPHQYLVRSRLRHAARLLTDGDIAVTDIAYDVGFGDLSNFVRTFHRAAGVSPTKFRQASKGERKILQERLALN

SEQ ID NO: 15608 - protein, 119 aa, BradyrhizobiumColbertium
MYDHIGLRVADLDAATRFYTAVLAPLGYVLCSSGDGYAGFGPKGEPALWLHLNKGRKADGAHIAFRAKNQDEVKAFHSEGLKSGGRDNGGAGPRKDYSPTYYAAFLIDPDGNNVEAVCT

SEQ ID NO: 15609 - protein, 41 aa, BradyrhizobiumColbertium
MICQAAAELLGGSNGSDMMAMIPQYRRGSPYRRPHRRDKSR

SEQ ID NO: 15610 - protein, 481 aa, BradyrhizobiumColbertium
MSDIAEIPVDEQERPLPPPPPPIRSALTDGPILRTLLSLAWPNVIGLSAGICVVIAETSYVGRLGVEALAAMALVFPTIILTMTMSGGAMGGAVASAIARALGAGNRERAGTLAVHALLIGVSFGLVFMLGMLIFGPKVLEMLGGRGDVLTHAIAYTQVFFGGAVLPWLLNTMAGVLRGTGNMKLPSFLILNSAAWQIVLGGTLGLGLGPVPRLGMHGVAAGALIAYSMNICIMGWYLFSGRARIVMRLRGLRIQWAMFFDILKVGAIACFSPLQSVLTISIFTHMLAKFGTAVLAGYGIGARLEFLLTSIAFAFGIACVPMVGMAIGAGRIARARRIAWTASAAAFVAVGAPACLVAIFPDLWVNMFTDSQAVRAASHQYLSTVGPFYAFFGLATTMYFSSQGAAKVIGPVLAQTARLVYIAGVGWWLSTHDASAQSFFWLAASSMVVLGLLSCSSVVLTRWGPRKGKPGIRPALSGAAD

SEQ ID NO: 15611 - protein, 350 aa, BradyrhizobiumColbertium
MTAASDTAQETQWKRWRAIADLYHAYFTGLILTVVTRRGTADAAEFVFRVFRRQQQERFLPGLEKLGLDHLPPAVAAAQYHYLSNWIGGVHVEYMYESDTKAWIRYPPPRWIWKGTAICGIPGEVSRAMLRGWHANNGVALGDLRLGFVCTKQSVDGQDGLEGYYHQYDHPLEVDQRLVFARHLEAPLFDANSAPALPVASWPKPRLEKAYRNYAMEYVRTAAPVLVQLFGPEDGGYLLHLTGKLVGMQYFDEVAAALTMRRGGAHEFASFLNALFAAQDDVAETTQSEGTFEIRQQSWKLMDDVADYHPACAEVLEGLFEGLAAGCGRHIGVHLRPSVGGRPPLVWTIQ

SEQ ID NO: 15612 - protein, 137 aa, BradyrhizobiumColbertium
MSNPSDLDIRIIEDVADALIYSDRSGTITRWNRASTVLFGFSAAEALGQNLDLIIPEHLRAAHWKGFEAALASGTTKLAGKPTLTRALHKSGRKLYIEMTFALVRDSGGNVLGSAAMARDVTERTERERAAKAAQNS

SEQ ID NO: 15613 - protein, 368 aa, BradyrhizobiumColbertium
MTFTVAADANGILPDRMIAAMAEAGLILPAYDFVESQIQPASLDLRLGDIAYRVRASFLPGPGATVAERIDELKLHEFSLADGAVLETNCVYIVPLLESLALPPEIVAAANPKSSTGRLDVFTRVIADGTRRFDMIGAGYHGPLYAEISPKTFPVLVREGSRLSQVRFRTGDAILNADELDALHAAERLVDVDDADLSGGVAVSVDLSGEKGGGFVGYRAKRHTGVVDVDRRSGYAVEEFWEPISARPDGSLILDPGEFYILASKEAVQVPPDYAAEMVPFDPLVGEFRVHYAGFFDPGFGYAGAGGQGARAVLEVRSREVPFILEHGQIVGRLVYEKMLARPDAMYGQRIGSNYQAQGLKLSKHFRA

SEQ ID NO: 15614 - protein, 395 aa, BradyrhizobiumColbertium
MSKSPAAYRPETRLVHSGTLRSQYGETSEALFLTQGYVYNSAEECEARFKGEDPGFIYSRYSNPTVAMFERRMIELEGAEAARSAATGMAAVTTAILAPLRAGDHVVASRALFGSCLYVIQDLLPRYGIETTLVDGLDLDQWQRALRPNTKTFFLESPTNPTLDVLDIPSIAEIAHGGGARLVVDNVFATPIWQSPLALGADVVVYSATKHIDGQGRCLGGIILSSEAFIAEHIHNFMRQTGPSISPFNAWVLLKGLETLGVRVRAQTDTAARIAEVLASHPKISRLVYPGRSDHPQAALVKKQMRGGSTLVGFEVKGGKAAAFRVLNELRLAKISNNLGDAKSLVTHPATTTHQRLKPEDRAALGISEGFIRFSAGLEHPDDLIEDLTAALAKA

SEQ ID NO: 15615 - protein, 326 aa, BradyrhizobiumColbertium
MSSLRPFCLTTWLAAPAAAALLLLAPAAYAQTPAAQPTPAQPADPTSASPAQTTVAARSSEQRGVTSRAIDKVKEVAKSAADIFNRVPCLPPKGGSKTMGSLPHVAGKLAAGQSVVIVAFGSSSTQGFGASSPEFNYPNRLAAQLRRHYPTADITVINAGVGGEDAPEMMKRLQTQVIDVHPDLVIWQVGTNAVLRNLDPGDTVKLVEEGISRIQAAGGTDIVLVDPQYSPAVNQRAESAGKMVKLLGKAAELRHVGIFPRFEVMRDWHEKQAIPVEGFVIADGLHMNDWGYACFAQLLGDDIIRSVDQIKLGVNVPADVRTYRPM

SEQ ID NO: 15616 - protein, 259 aa, BradyrhizobiumColbertium
MKAKVLLSLILLCGSLTAPTARASDAAPTASVAPASCDLPAYLLTSESPLPKVAAAVKAGKPLEILVIGSRSTTIPSSENSSYPARMEAILKEKLPPSEVVHVSVEIQSKKTAEETAATFVKLMEAKTPTLVIWQTGTVDAIRAIDPDDFRSAVTEGVVALQSAGTDVVLMNLQYSPRTETMISAQPFLDNMRVVAQEHDIPLFDRFAIMRQWNDQGQFDLFSPSRGPELAKQVHDCLGRALAQFVIDAAHREPAQQQN

SEQ ID NO: 15617 - protein, 418 aa, BradyrhizobiumColbertium
MTIADQVTGPTIAGAAGPKPAAAKPRTAVPAITLPAIGERELRLDLFRGLALWLIFVDHLPPSLLTWFTIRNYGFSDATEIFIFISGYTAAFVYGRAMLESGVVIATARILRRVWQIYVAHVFLFTIFLAEISYVATRFENPLYTEEMGIMDFLKQPDVTIVQALLLRFRPVNMDVLPLYIVLMLALPFILWSMKWRPDVTLGLSVVLYAVTWEFDLYLSAYPNGFWAFNPFAWQLLFVFGAWCALGGARRMSRILSSRVTMWMAIAYLVASFYVTLTWYVPQLSQFMPKLIEQWMYPINKTDLDVLRFTHFLALAALTVRFLPRDWPGLKSPWLRPLILCGQHSLEIFCLGVFLAFAGHFILAEVSGGAVMHALISLCGVLIMWGVAWVISWYKRVADKSGAKSKNAVGNADLAGGG

SEQ ID NO: 15618 - protein, 130 aa, BradyrhizobiumColbertium
MYRAVTRQIEVTVEPNFVPEQSSADRSRYFWSYPIVITNSGEEKVQLKTRHWIITDASGRQQEVKGEGVVGEQPILAPGERFEYTSGVPLSTASGFMTGRYQMVSETGERFEIDVPTFSLDSPDNKRVLN

SEQ ID NO: 15619 - protein, 328 aa, BradyrhizobiumColbertium
MKTGPEGPVRAPSAVPIDDAVLPYEVDALDVRGRLVRLGPALDDILTKHDYPAPVGKLLGEAIMLTTLLGSALKFEGRFILQAQTDGPVSFLVVDYVAPDRLRAYARFDAARLGEAKDSGTLLGRGHLAMTIDQGPDMSRYQGLVALDGGSLEDAAHEYFLRSEQIPTRVRLAVGEEWRSSDGGKHRWRAGGMLMQFLPKAPERARQADLHPGDAPDGTEVHSVAEDDAWVEARSLIETVEDIELIDPELSGERLLYRLFHERGVRVFNPQVLQARCSCSRDAVASMLKSFSPDDRAAMVKDDRVVVTCEFCSSVYQFTPHEAGVEDA

SEQ ID NO: 15620 - protein, 311 aa, BradyrhizobiumColbertium
MSKTPDKAPKHFLDINELPLSELKRMLAASSAMKAKQKAHQPVRPLEGKTLAMIFERPSTRTRVSFDVGMRQLGGEAIMLTGAEMQLGRGETIADTARVLSRYVDAIMIRILNHDALLELAANATVPVINGLTRRSHPCQVMADLMTYEEHRGPIEGRTVAWTGDDNNVLASWAHAAERFKFQLNVATPSELAPKKAMRDWIKATGAPIVLGTDPEAAVRGADCVVTDTWVSMGDKEGEHRHNVLKPYQVNAKLMSLAKPDALFMHCLPAHRGEEVTDEVIDGPQSVVFDEAENRLHAQKGILAWCFDAVK

SEQ ID NO: 15621 - protein, 402 aa, BradyrhizobiumColbertium
MTNSAAPHLLPVFARADLGFERGEGCWLIATNGDRYLDFTSGVAVNALGHVHPALVKALQEQATKLWHMSNLFQSPDGEKLASRLCNESFADFVFFCNSGAEALEGVIKLVRHHHFSKGHPDRYRMITFEGAFHGRTLATLAATGSAKYLEGFGPPMEGFDQVPHGDLEAVKKAIGPHTAGILIEPIQGEGGVRSSSPAFLKALRELCNEHGLLLAFDEVQTGMGRTGELFAYKRTGVVPDVMSLAKALGGGFPIGAVLATADAAAGMGPGSHGSTFGGNPLAIAAANAVLDVMLKPGFFDHVQKMSLLLKQKLASVIDRHPDVVSEVRGEGLLVGIKAVVPSGDLVAALRAEKLLTVGAGDNVVRFLPPLIVTEAEIEDSVGRLERACAAISSSQTKRAAS

SEQ ID NO: 15622 - protein, 170 aa, BradyrhizobiumColbertium
MTVLTWSDDRVEQLKKLWEAGLSASQIAAELGNVTRNAVIGKVHRLGLSGRAKSPSSAAPRPRKARPAQHMMRVTRPVARGNTALAQAFEVEVEAEPVTYDNVVPMSQRLSLLELNEATCHWPVGDPSSPDFFFCGGKALSGLPYCAQHSRVAYQPAADRRRAPAKPGTR

SEQ ID NO: 15623 - protein, 235 aa, BradyrhizobiumColbertium
MGARIMVVEDEEALTELLRYNLEGDGYDVETVMRGDDADTRLKEHIPDLIVLDWMLPGLSGIELCRRLRTRPETKQLPIIMLTARGEESERVRGLATGADDYIVKPFSVPELLARVKGLLRRASPERLATVLAYGDIELDRDKRRVARSGRPIDLGPTEYRLLEFFLEHPGRVFSREQLLDSVWGRDIYIDERTVDVHIGRLRKLLNLGREQDPIRTVRGAGYALDDRFAKAEQT

SEQ ID NO: 15624 - protein, 238 aa, BradyrhizobiumColbertium
MGSEHTAKAFDSDLQELTRLVAEMGGIAERMIVDSVDALIRRDVALGQRVVATDTELDALQKRIEERAVLTIARRQPMAVDLREIVGAMRVATDLERIGDLAKNMGKRVAALETDFHPLKLFRGLEHMTDLVQQQVKSVLDAYAAHDLPAAMAVWKGDEEVDAICTSLFRELLTYMMEDPRNISFCIHLMFCAKNIERIGDHATNIAETVFYMIEGQAITDKRPKGDMTNFATTIPNT

SEQ ID NO: 15625 - protein, 273 aa, BradyrhizobiumColbertium
MSEMSVSVSAPTVHPGSQPLPEAPAKVTARNLNFYYGEHHALKNINLALGTNRVTAFIGPSGCGKSTLLRIFNRMYDLYPGQRATGQLLLDHTNILDPKLDLNLLRARVGMVFQKPTPFPMTIYENIAFGIRLYEKISKSEMDDRVEKALRGGALWNEVKDKLNASGLSLSGGQQQRLCIARTVAVRPEVILFDEPCSALDPISTAKVEELIQELSENYTIAIVTHNMQQAARVSDKTAFMYLGELIEFDDTSKIFTSPSDRRTQDYITGRFG

SEQ ID NO: 15626 - protein, 281 aa, BradyrhizobiumColbertium
MNPIYARRRRWDIVIRGLCIAAAAFGVTWLALILITLFYNGLAGLNFQVFTADTPPPGSTEGGLRNAIVGSLIMTAIGVGIGAPLGLFAGTYLAEYGRNDKLTSVIRFINDILLSAPSIIIGLFIYGAVVVPMRGFSAIAGALALAVIVIPVVVRTTEDMLLLVPNPLREAASALGLPRSLVIKRIAYRAARSGLITGVLLATARVAGETAPLLFTALSNQFFSLGLDKTMANLPVTINNFVQSPYAYWKQLAWSGALLITLTVLALNIGARIIGAERTAK

SEQ ID NO: 15627 - protein, 329 aa, BradyrhizobiumColbertium
MAVQSDVIDDAGPYDRAKALGAFKLGDVTFYWITRLSAISVLLILGGIILSLVVGAFPAMKEYGLSFLWTQRWAPSADPPVLGALGPIYGTLITSFIAMLIAIPVGLGIAIFLTELCPQWLRRPIGMAVELLAGIPSIIYGMWGFFVLGPFLANTFQPFMIKVFDGVPVLGAIFAGPPSYLSLFNAALILAIMVLPFITSISVDVFKTVPPVLKEAAYGVGCTTWEVVRSVVIPYTRVGIIGGVMLALGRALGETMAVTFIIGNSFRISSSIFAPGTTISAAIASEFAESDGLHQSGLILLGLLLFVLTFFVLAAARLMLMRLETKAGK

SEQ ID NO: 15628 - protein, 337 aa, BradyrhizobiumColbertium
MNFLKTMVAAGLVAASTTAAFAADITGAGATFPFPLYSKWADAYKKETGNGLNYQSIGSGGGIKQIQAKTVTFGASDMPLKPEQLEKDGMIQWPQAMGALVPVVNLEGIKSGELVFSGELLGDIYLGKVKTWNDPAIAKLNPKVKLPSDAITVVRRSDGSGTTFIWTDFLSKTNAEWKTKVGAGTAVEWPTGVGAKGNEGVAGNVSQTKNSIGYVEYAYAKQNKLTYGALINKSGKTVQPTVAAFQAAAANADWAGSKNYYVILTDQPGEASWPITGATFILMHKDATDKAASQEALKFFKWAFEKGDKMAEELDYIPMPDTVVKQIEKTWAAEIKS

SEQ ID NO: 15629 - protein, 432 aa, BradyrhizobiumColbertium
MAIDAPSSPNVQPWSDRLRHSTIILIAAALALSVVVSLGELSALHAAIVFLCIAAAALIPWRLHDPAASRDDVRRINPVESAAVAAVVAGMPDPAVLLDRAGRVIHLNAAAAQLAPALRRNELAQFALRSPEIITALREAIATTEPRRATYLDHVPVDRWMELMITPVPVPTSFGGTDKCMLMTFHDQTPLRRVEEMRADFVANASHELRTPLAALSGFIDTLQGQAKDDPKARERFLGIMHNQATRMARLIDDLLSLSRVELSAHVRPDTLVDLVPIIRQVADGLEPLARERQVVVEIQLPDPPVMIAGDREELLRLFENLIENALKYGASGGRVIVSLTSGAASDGTQEIRIMVRDFGPGIAPEHLPRLTERFYRVDVGDSRSQGGTGLGLSLVKHILNRHRGRLLIESVPKQGATFTACFPQAKISAAA

SEQ ID NO: 15630 - protein, 328 aa, BradyrhizobiumColbertium
MISIAVIGIACYVLYHMLRGIDFNEVLEAIKSTEPSQIAMAALFVAAGYFTLTFYDLFATRAIGHAQVPYRITALAAFTSYSIGHNVGASVFTGGAVRYRIYSAYGLNAIDVAKICFLAGLTFWLGNAAVLGLGIAYHPEAAASIDQLPPWLNRTLALMIIAALVCYVVWVWTQPRVVGRGPWTVVLPGGPLTLLQIAIGIIDLGFCALAMYVLVPDEPNLGFVVVAMIFVSATLLGFASHSPGGLGVFDAAMLVGLWQMDREELLGGMLLFRLLYYVSPFVISVILLTFREVIIGTRSKRLQQAALKLDPGPAREAAYVRERSDSGA

SEQ ID NO: 15631 - protein, 86 aa, BradyrhizobiumColbertium
MQDLLLAQKRRRPAYGFQHLDLEQRFSGQGGRRTGGRLTGTQRTFAAGTGIAHAPCPSTSAFSGGVEFASSNKNTCLQYFRQGHGS

SEQ ID NO: 15632 - protein, 100 aa, BradyrhizobiumColbertium
MPYLVSFHLGWLIGSLLLGFCMGWISVVQRGNGTSKVTARWLAALAVALIAASVAHVVPGRFGYWLDLGLIMFACYLVGCTIGAWLRDRVVSRTAPPAAP

SEQ ID NO: 15633 - protein, 444 aa, BradyrhizobiumColbertium
MWGFAAWNNTLPVEADLSARSSAVLKNTVLDKTRIAVDGRDVSLAADAFSEEGRRDAVMAVETVPGVRLVDDRTRLVPEAKPFVWNAERDVVRVTLSGSASLPSMKARLTEAARKEVGGAEVADQMGLARGAPPRFEAAAMLLLDQIGKLKDGKITITDTKVNLSGMARELGGREAIAAALKNLPEGFSIAANDIKAPPYIFQAYKDPVAAKVTLTGYVPDNNVHAAIATSASRKFFTEKVVDNLKASVGAPGSFSMAVVAALGALSRLSTGTLVVSDREVKLSGDALYEGAANDIRAGLGRDFPKTWQYKPEITVKPAAGPVDGTVCQQLFTELLTKGKIRFANRRADIDPDSAAILDRLIETALRCPTTNIVVVGHTDADGEDSFNQALSEKRAQAVIDYLVKAGLPASRFTAVGHGSTQPVASNDTDEGKARNRRIEFLVR

SEQ ID NO: 15634 - protein, 72 aa, BradyrhizobiumColbertium
MFHDRLRDSGIPPSTYGRTLEEKVIWIVQAGPSERHHFRFDSLPRVCFVSVSRVRVVECKSFSRGPANGGRG

SEQ ID NO: 15635 - protein, 352 aa, BradyrhizobiumColbertium
MKQLRNNVIRAGLGALYFSGAHHLLRPLLSGVGAIFMLHRVRPAREAAFQPNRHLEVTPEFLRATLCHLRSRDIDIVTMDELHERLAQGRFDRRFAAFTLDDGYRDNLDHALPVLREFDAPLTVYVASDFADGTGRLWWAALEAVIAKAEQIDITIGNSALRLDATTPAAKQATFDRLHDWLRALPGEHDLKREIEALCTTYDVDMGALCRSLCLSWTELKTFAADPLVTIGAHSVSHCNLAKQAEDVAAQEMTVSRERIEQALERPVLHLAYPYGDREAAGMREFTLAAAAGFKTAVTTRPGMLFADNAAHMTALPRVSLNGNYQDARILPVLTSGAATAMWNGLRRIAAA

SEQ ID NO: 15636 - protein, 287 aa, BradyrhizobiumColbertium
MTPLPAPLTTSANQGRHHVQRSVLAQRPHRAGDRRLARHWQDDCGGFLSAGAAKVYITARKAGPCEATAKELSAQYDGECIALPIDISTVAGCELLANEYGKREARLDILVNNAGAAWGAEFDEFPESGWDKVMNLNVKAPFFLTKALAPTLRASGSAERPAKVINIASIDGIFVNPGETYSYAASKAGLIHLTRRMAVKLVPDHIVVTAIAPGPFKSDMNRAARDHADEVATRVPVGRIGTDEDMAGAAIYLASRAGDYVVGATIAVDGGIVYANPGIKGSGWDSD

SEQ ID NO: 15637 - protein, 483 aa, BradyrhizobiumColbertium
MNVNIMNVDYSTKIPNNVNLAEDRQVLKALEGWHPGYMDWWSDMGPEGFQESLVYLRTAYSVDPRGWAKFDYVRMPEYRWGILLAPQEENRVVPFGEHYGEPAWQEVPGEHRAMLRRLIVIQGDTEPASVEQQRHLGKTAPSLYDMRNLFQVNVEEGRHLWAMVYLLQKYFGRDGREEADDLLRRRSGDADAPRMLGAFNEATPDWLSFFMFTYFTDRDGKMQLHSLAQSGFDPLSRTCRFMLTEEAHHMFVGETGITRVVQRTCDAMKAAGITDPTDIAKVRALGVIDLRTIQKKLNLHYTLSLDLFGSEVSTNAANAFNAGIKGRYHETQIEDDHQLKNSTYPVLKLINGEIKLVDEPALTALNMRLRDDYSQDCVKGMLRWNKVISTAGYDFQLKLPNVAFHRHIGEFKDVHATPDGILIDDATWAKRKDEWLPSASDGDFITSLMQPVTEIGQFASWISPPKVGIDNKPGDFEYVKIES

SEQ ID NO: 15638 - protein, 562 aa, BradyrhizobiumColbertium
MAGEDRRLAGGATFIDFQTEPSRYKHWKLTVDGDVATLTMDVDENGGLFEGYLLKLNSYDLGVDIELADALQRLRFEHPEVKVVVMRSAKNRVFCAGANIRMLAGSTHAHKVNFCKFTNETRNGMEDSSENSGQRFITVVNGSAAGGGYELALATDHIILADDGSSAVALPEVPLLAVLPGTGGLTRVVDKRKVRRDHADFFCTIEEGVKGKRAVQWRLVDEIAPNSKLEARIAERAREFAAASKRQGSGKGIALTPLNRVIDETGIRYGFVTVDIDRAARIATISIKAPEAAPPADIDGMMAQGASFWPLQVARELDDAILHLRINELEIAMLVFKSHGDRAHVLACDAFLEANKAHWLVNEIRHYWKRVLKRIDVTSRTLVTLVEPGSCFAGTLAELVFAADRSYMLIGTRQGDNRPPPSIELSAMNFGPYPMSHGLTRLQSRFQADPSDVDRAEATLGTALDAEQAEELGLVTFALDDIDWDDEVRVFLEERASFSPDSLTGMEASLRFVGPETMESKIFARLTAWQNWIFQRPNAVGEEGALRRYGSGQKPKFDMTRV

SEQ ID NO: 15639 - protein, 272 aa, BradyrhizobiumColbertium
MTNLTPTGFLSIGTASLEYKWLAPPAADAPTIVMLHEGLGSVGLWSDFPEKLQQASGAGIFVYSRAGYGQSSPVALPRPLDYMQREALDVLPKLLDLIGFKRGLLLGHSDGASIATIYAGAHQDHRLSGLVLIAPHFIVEDISIKSIAAIKTTFETTDLKTKLARWHKDVDNAFYGWNGAWLDPKFRDWDISDYLAYIRVPVLVVQGADDQYGTLRQVEIAQEECYCPVDVKIVSGAGHSPHREAPAATLEAIEQFAGAALRDDQGLQGRAA

SEQ ID NO: 15640 - protein, 513 aa, BradyrhizobiumColbertium
MSEGSYNAVTWLLDRNVEEDRGSKLAFDDTVSRITYGELQRQTRRVANMLRRLGVRREERVAMIMLDTIDFPVVFLGAIRAGIVPVPLNTLLTADQYAYILADCRARVLFVSEALYPVIKDVVGRMPDLEHVVVSGAKQNGHKQLAEEMAGESDQFTTAVTHPDEPAFWLYSSGSTGMPKGVRHLHSNMQATADTYAKQVLGIRESDVCLSAAKLFFAYGLGNALTFPMSVGASVILNSERPTPARMFDLMNRYNPSIFYGVPTLFAAMLNDETMKGERCGEALRICTSAGEALPESVGNSWKARFGVDILDGVGSTELLHIFLSNAPGDIKYGSSGKPVPGYAVRLVNEAGQDVADGEVGELLVDAPSAGEGYWNQRHKSRRTFEGPWTRTGDKYVRDGEGRYTFCGRADDMFKVSGIWVSPFEVESALITHPAVLEAAVVPEADPEGLLKPKAFVVLRPGATTTDLQEMLKEHVKQKIGPWKYPRWIDVVESLPKTATGKIQRFKLREGAN

SEQ ID NO: 15641 - protein, 302 aa, BradyrhizobiumColbertium
MSESPDAESRFLEQLGQRVRTMRALRGMSRKVLAKVSGISERYIAQLESGKGNVSIVLLRRVSDAMGAHLEDLLPSADPTPDWQMFRDLLRKATPAQIAQAKELLSGGSASAPRRAPFCGIALIGLRGAGKSTLGKILAKKIGWSFVELNKEVEQQNGLSVAEIIALYGQEGFRRMEQAALQQLLARNELMVLATGGGIVSEPLTFDQVLSSFYTIWLKAEPEEHMARVRRQGDLRPMADDRSAMAELRNILLSREPLYSRAAAVVDTAGLSVDAAAVRLIDAVRPVLQNEARSFGLRSVAL

SEQ ID NO: 15642 - protein, 131 aa, BradyrhizobiumColbertium
MTNIDASVSLFDRIGGSATIDALVDRFYDRMDTLPEAKIIRAMHAEDLGPIRDVLKRYLTEWTGGPKLYSPEKGHPRLRQRHFGFAIGDAERDAWMLCMRGALAETITDAAARQHLDRAMSGLADWMRNRP

SEQ ID NO: 15643 - protein, 277 aa, BradyrhizobiumColbertium
MDASIAPEVIRRPVPAHMTHIVSSISCYRERGAGLTNFRHAAPLSLPFLINLGSPFRIALGREPDRSDIQPSFVAGLFPGPVQIESDGRAMCVQIDFTPLGAYRFYGGAVPDLTARMVDIGDLLGRDGRELGERVAEADNWQRRLDIIETFVLERTVHEPSPAIAAALSRLWRSAGAARISDIASDIGWSRKHLARRFHNEIGVSPKTLARMLRFHRACELARNGDRRGWAGIAIEAGFADQAHLARDFKEFSGEKPTIWAARLEQLDPRLIREAGG

SEQ ID NO: 15644 - protein, 144 aa, BradyrhizobiumColbertium
MSSPTGNEPPRLYHTMRCKDAEAMIVWLKDVLGFTERVVYRRENIVAHAELSFGSSILMLGAHRQDSYGKSVGELDGRRTDAVYMAVDDPDALYARVKASGARIETELQDTDYGSRDFSARDPEGGLWSFGTYWPKAGEDPLPA

SEQ ID NO: 15645 - protein, 237 aa, BradyrhizobiumColbertium
MDNRRARIRLAGMTDTLPDTIRRLYTDPGEYIDSDHPAVQRFAETSVRPEADAREKASVLYKAVRDGIRYNPYVSMRVAETFRASSVLAAGQGYCVGKAALYAAACRVHGIPARVGFADVKNHLTTEKLRASMGTDIFTWHGFTEVHVDGAWRKATPTFNDTLCAKVGVAPLDFDGHSDALLHPFDGEGRAYMQYVNDRGTYHDVPAKFLMREMARVYADMQGEDLTGRDMEREAEQ

SEQ ID NO: 15646 - protein, 261 aa, BradyrhizobiumColbertium
MPKLKRDEREERATDFVESLDRGLRLLQCFGTTAGPTTLSDLARAAELPRATARRMLFTLQRGGFVIGDGKLFSLTPHVLTLAASYLRSNQLVAVLQPVLDRIATAAQEISSLAVLDGDEVVFIARGSPARVFSGGLEIGYRLPAFCTSVGRAMLGQFDDAELTARLKMMKREPLTPQTVTDPRALLARIAADRAQGYSLVDREAEPHFRSISVPVRRYDGVIVAAINMGAHIDRVPAQELVDRFLPLLREGAGSVRSLLL

SEQ ID NO: 15647 - protein, 452 aa, BradyrhizobiumColbertium
MMSQEQNDLITRTGPKDPCGKLMRSYWQPAALVDELEGARPIRPVRLLGENLVLFRDETGRYGLIDRHCAHRGADLAFGRLEHGGLRCSFHGWLFDATGQCIETPAEPKDSKLCQNIRQRSYPVVEKSGILWAYLGEGEPPAFPEIDCFVAPGTHTFAFKGHMACNWLQALEVGIDPAHASYLHRFFEDEDTSTAYGKQFRGASAGSDLPMTKILREYDRPIINVEHTEYGLRLIALREIDEERTHVRVTNQLFPHGFVIPMSTEMTITQWHVPVDDENCYWYAIFTSYTNPVDKQKMRDQRLELYELPDYISRKNRSNDYGFDPHEQQTATYTGMGNDINVHDQWAVESMGAIQDRTKEHLGQSDKAIVQYRRLLRQEIEKVSGGEKPMLFLDEANARSIQGPATMDGIGPTRGWETYWMEVDVKRRRGAPWTAPVPKEIAAKVHRLTAAE

SEQ ID NO: 15648 - protein, 478 aa, BradyrhizobiumColbertium
MTFVARHALWSDEQRDAASRMRRLAEEKNLEVIRLAFPDQHGILRGKTIIAAEALASLESGCSITTTMLAKDTSHRTVFPVFTAGGGFGMKEMEGAADVLMVADPTTFRVLPWAPTTGWVLCDLYFNDGRPVPFATRGLYRRVLDELGTRGYDFVAGLEVEFHIFRLEDAHMRAEDAGQPGTPPSVSLLSHGYQYLTEQRFDQMEPVLEILRRDIVALGLPLRSVEVEFGPSQCEFTFAPKKGLAPADNMVLFRSAVKQIARRHGYHATFMCRPKLPNVFASGWHLHQSVVSRASGDNLFMAKDGAEPLSAFGQAYLAGLLDHARASTVFTTPTLNGYKRYRSYSLAPDRAIWGRDNRGVMIRVLGGAGDAATRLENRIGEPAANPYLYMASQILSGLDGVERKLDPGPSADTPYETKAPLLPKSLRDAVAALKDDPFFREKLGAEFVDYYTHIKDAEIDRFLSEVTDWEHREYFEMF

SEQ ID NO: 15649 - protein, 93 aa, BradyrhizobiumColbertium
MLAIGRALMTNPKLLILDEATEGLAPLIREEIWSCLSLLKSRGQSILVVDKNVDHLARICDRHYIIERGKTVWSGSSDELMAEPDLQHKYLGI

SEQ ID NO: 15650 - protein, 255 aa, BradyrhizobiumColbertium
MAEPLLRVEKLVRRFGGIIATDNISLDVASGELHAIIGPNGAGKTTLISQLTGHLAPHSGSVSLAGRDITFLPAYRRCALGLARSFQITSLLLDFTAADNVALAAQAHAGTSFRFFANARKEKGLRDAAHAALDRVGLLHRADVVVSRLSHGERRELELAVALASKPKLLLLDEPMAGLGVTESQRMVKLLQELRKEVSIVLVEHDMPAVFALADRITVLVYGRVIASGDPAAIRQNEDVKRAYLGDQHVVTHHG

SEQ ID NO: 15651 - protein, 314 aa, BradyrhizobiumColbertium
MKAFTVSKAVTALMLAGLVLLPLYSHLSGNIFILTLFTRIIILALAAASLNLIMGFAGLMSFGHAAYLGIGGYAVGMLAQEGVGSGFIQFPVALAASAIFALVIGALSLRTRGVYFIMITLAFAQMAYYVASGLARYGGDDGLTIYKRSDFSGLIDLGNRTQFYYLCLACLFGVIFLIWRIVNSRFGLVVQGLRSNEQRMQAIGFPAKRYQLVCFVISGTMCGLAGALLANNTDFVSPAVMYWTRSGDLMVMVILGGMGTLFGPVMGAVVFLLLEELLSQITEYWALILGPLLLLIVLFGRGGIMGALGRANRG

SEQ ID NO: 15652 - protein, 305 aa, BradyrhizobiumColbertium
MLLVVEQFLNGLQFGLLLFLLAAGLTLVFGIMDLVNLAHGSLYMMGAYFAATFAAWTGSFLLGALMALGATLVLGIVLEVTALRHLYGRDHLDHVLATFGLILFFNEAVRLIWGPAGLALPLPAWLTVPVPILPGIHYPAYRLAIIAVALLVALLLYLGVMRTRIGMLIRAGASNREMIGALGINIKLLYTLVFGLGAALAGLAGLMQAPILTVQIGMGENILILAFVIIVIGGIGSIRGAFLAAIFVGMIDTLGRAFLPNLLRQVLSGAAASTAAPALSSMLIYLVMAIVLVVRPEGLFPANRR

SEQ ID NO: 15653 - protein, 37 aa, BradyrhizobiumColbertium
MRVHAVETALQEGCRNGWGNLPQPRDHPPALAQADLM

SEQ ID NO: 15654 - protein, 72 aa, BradyrhizobiumColbertium
MSNMMRDSQLMVQIKDENLGYMSDMALELAQMAEDSGLMTLAYLFRMAALEASTASSVLAEPDQLPRQVTSH

SEQ ID NO: 15655 - protein, 219 aa, BradyrhizobiumColbertium
MIHAISAINRHLYEDVIEQHFRLRHDIFVEERRWETLRRPDGREIDSYDDEDTVYLLALEGRRVVGGHRLYPTTKPSMMSEVFPHLASMRGCPADPLIWEWSRFFVVRDRRDGALNAQLMAAVQEFCLNQGIAQVSAIMETWWLPRFHEAGFVVTPLGLPALVENAWTMAATIDIRRQTLDALRDRIGMASVVRQDGPRLDAVARANLCGLAAAQRKSA

SEQ ID NO: 15656 - protein, 243 aa, BradyrhizobiumColbertium
MSAVVDYGREALDFIEGLETYRKVPDAMNALETAFGRFGFETIIVTGLPNPDQQFAQMVLAKRWPAGWFSLYTQNNYDRFDPVVRLCRQSINPFEWSEAPYDAELEPYAAEVMNRASEFRMSRGFIVPIHGLTGYEAAVSLGGVHLDLNPRSKPALHLMAMYGFDHIRRLLQPVPHSPARLTPREREVIAWASQGKSAWEIGEILHITQRTAEEHLASAARKLGAVNRTHAVALAIRNKIINP

SEQ ID NO: 15657 - protein, 58 aa, BradyrhizobiumColbertium
MQDEDIALNSVLGLELNRVFFAVHATANKQKIIEFAREVLRGERAELAESILPEGPAS

SEQ ID NO: 15658 - protein, 70 aa, BradyrhizobiumColbertium
MSEFEGRMQTMLDAALDAAFSHVRHGGDHESRKLIAARLMEAARSGTTALEELTSVGRRALIDLTNSSSD

SEQ ID NO: 15659 - protein, 565 aa, BradyrhizobiumColbertium
MTEGITKSATGIEGFDDLTLGGLPTGRPTLVCGSAGCGKTLFASTFLFNGARLHDEPGVFVTFEERPVDIVANVDSLGFDLQGLIDQSRIHIEHIEIDPAEVAEIGDYDLEALFLRLEFAVDQIGAKRIVLDTIESLFSAFSNPAILRAEIRRLFDWLKQKGLTAVITGERGDGSLTRQGLEEYVSDCVILLDHRVDNQISTRRLRIVKYRGTAHGTNEYPFLIDEDGFSVLPVSSLGLGHKVFDDRISTGVPDLDAMLTGGGFYRGSSILLTGVAGSGKSSLACMMANAACERGERALYLSFEESEAQTVRNMKSIGTDLGKWLKDGQLRYIATRPTFYSLEMHLAIMLREIGRFKPQLVVLDPISAFTGSADISEVQTMLLRIVDYLKSNGVTAVFTHLANVQQAETDAGLSSLMDGWILLLNREANGEFNRELYLLKARGIAHSNQVREFVMSSSGIHLLEPYLGEGGALTGSARRNEEARARRTEATRRSEVARLQDQVTQRRRRALAQIEALKADIDADEAELNRLVSAETHYLQQSRDDAAALARGRGMEAPSGKTRQD

SEQ ID NO: 15660 - protein, 87 aa, BradyrhizobiumColbertium
MKLVLYVAGETPKSLAAIRNLEKICSEHLAGKYKVEVVDLKKQPQLAREHGIVAIPTLVKELPVPIRKIIGDLSDTQKVLVHLSVEG

SEQ ID NO: 15661 - protein, 494 aa, BradyrhizobiumColbertium
MTVVSLVSALTRDELEARLYEAEETLRAIREGEIDAVVIKGGATEQVFTLEGGSQSYRTFMEAMDIGAAAFDAEGQLLYANQALCKLLDRPAGALSGQALLDILDAVNQTTFRRLLTQALKERQSAEIHVRVGDSERSFLLTGAPIDFGIVSGVAITFTDISEREQIAAAKESERLARSVLASANEAVIVCDRSGRVTHINAAAERICAEAPIGKPFEEAIELTFADASELMSGADIVAMATSGTPVQGLEAAVKTSAIDVTDVMISAAPLIVSGDRTQGCVVTLINLSQRKAAERRQALLMGELDHRVKNTLAMVLAISARTAAHERTIEDFQKSFSGRIQALAATHTLLSNASWENLQIKDVLRVELAPYATLSSGRITMEGLDISVDSKTAVSLGLVFHELTTNAVKYGALSTRSGKLSVRRLGLLEDGALQIEWEERDGPLVTPPTTSGFGQTLISRSLGSGPNGGTKLEYRPSGVVCQIVIPKYGHFLS

SEQ ID NO: 15662 - protein, 136 aa, BradyrhizobiumColbertium
MKDALPDDPETLKAMLLAERCESERLRQIIKEMQRHRFGRRAETLPEHQMLLGLEDVEQVAAYGETAQDVSATEGREARARKRRGNRGALPVHLPRIEVVVDIEERPVPAAKASYTGSARIEASGWTWSRRSSGSS

SEQ ID NO: 15663 - protein, 98 aa, BradyrhizobiumColbertium
MAQIGTFTRAEDGSYSGTIKTLSLNIKARFLPAEPSENEKAPSLRVMAGNVEIGAAWQRTSKENTVYHSVKLDDPSFSAPIYANLVAVDDGYALVWSR

SEQ ID NO: 15664 - protein, 350 aa, BradyrhizobiumColbertium
MHAAGFALDNVLDGLTASAAAFKGKKSIRAYAGAGRLFIRYLQDRETLPRSAPPPSPTEIWPLLAAFRRWMRDQRGVVNSTLDTYQSTLVDLLEALGDNPTAFTAHAIRAFVLERAKPHSRGRAKSIAAATRAFLRFLVATGQSPVGRDYAVPGFANWQLASVPRFLAADDIARAIAACEGEGRLRDKAIVLLLARLGLRASEVADLKLADVDWRNGRITVAGKSRREEWLPLTQEVGDAMIAYIERVRPPLSTPRLFITEAAPVRPLTRIAIKCIVRRTLLRAGIKSAHQGAHVLRHSAATTMLRHGVSLTGVGAVLRHRSPAMTMHYAKVDFALLSEITQPWIGRLPC

SEQ ID NO: 15665 - protein, 304 aa, BradyrhizobiumColbertium
MLSDDAERYIELRRTLGFKLRKPSRHLQSFARFATEKGESYVSAATALEWATMAPTRCTRHRRLGDVVRFARFLRAENTAHEVPVILFAERASRPVPYIYTPDELTRILEGAGQLRRQKPNPLRRQLYVMLFGLIAATGLRVSEALDLRFDDLLADGVLHIRDTKFGKSRLVPLHPTVVEALDRYLDRRRLVAGSDDHLFPSAKGKRLASSTVNYTFRCVLRFANIAPERPRRPRIHDLRHSFATHVLEQCNTERDAVARHFVALATYLGHVDIKHTYWYLQATPELMTDIAAAAETLIMGEPI

SEQ ID NO: 15666 - protein, 335 aa, BradyrhizobiumColbertium
MTLLAPLITGFLRDYMPRQRGYSPHSCEAYAYSFRLLFAFAAKRIQTKPSQLLIEQLDAALILDFLGHIERERGNGAATRNLRLASIKTFMRYVEYQVPSALEQIGQIHAIPVKRHDQKLIRHLVMVEVRAILNAPDLTTRLGVRDRAMMHLCFAAGLRVSELVGAMMANLSLQRPPSLLVLGKGRKERCLPLWKETAADLRAWLTLRGSVRVPELFVNAEGAPMTRAGFEYVLEKHARAAAETCPSLCNRSISPHQLRHSCAVIMLQATHDIRKVALWLGHADIRTTEVYLRMDPSEKLEAVEAVVPPELRRGRFRAPDALIASLLADTSPPPA

SEQ ID NO: 15667 - protein, 98 aa, BradyrhizobiumColbertium
MAQIGTFTRGEDGVFAGTIKTLSLNVKARLVPADESTNDKAPDLRVLVGNVEIGAAWHRTSKENTEYHSVKLDDPSFPAPIYANLFKGETDYTLVWSR

SEQ ID NO: 15668 - protein, 81 aa, BradyrhizobiumColbertium
MMPIEPPEIPPSTPGTPTEPPLGVPPGNPQPEITPPVREPGESPSPDELPGRVPEEIPSRGPNGPLTPNPATDASSSRGYA

SEQ ID NO: 15669 - protein, 161 aa, BradyrhizobiumColbertium
MANDNARDVDRVWDLMKTIGFAMLVTRDGGKLRARPMSAYLDRAANTIFFLTDARNHKDEEIARDPSINLSFAEAGSQKYVSLTGTAVISNDRAKIKELFSTPAKAWWDSAEDPNIRVLKITPDDAEFWDSPGTVISYVKMAAAAVTNTRPDLGENRKVSM

SEQ ID NO: 15670 - protein, 97 aa, BradyrhizobiumColbertium
MEVTAEQTGHAAAAGFGADGKPDFWFGGDGAMNKPVHIALRAKDRATVDAFYNAAIAAGGRDNGPPGIRPHYHADYYGAFVLDPDGHNIEAVCHAPE

SEQ ID NO: 15671 - protein, 274 aa, BradyrhizobiumColbertium
MTTDNNSSSAPFGTFAPNAAQAAIIRLAQRSRLKRGAFRPWMSRLVNLVRSGPVDVQYQGASFRFYHQGSATERGALFNPEYNLDELDFLRQHTSGGGVFVDVGANVGTFALVMARQVGPTGKVVAIEPHPLTFARLSFNQSASKAAQVRLLQAAAGDKDGELMIESGGGNLGATHVVTGTASTDAIKVPSLRLTRILGEAGVTQVDSLKIDVEGFEDRVLIGFFRDAPPSLWPRAVVIEHLSQNEWQQDCIADMVARGFTIARKTRSNTFLSR

SEQ ID NO: 15672 - protein, 717 aa, BradyrhizobiumColbertium
MQGAQRKSLRLLQWMMAASLALPVALFAITSAISYTSTTDIADREIERTLDVAHEHALKVFETIDRSLAELNEVVRGLSDDVIRAREPTLHLRLKRLADSLPQLKSAWIFDADGKALVNSLASPPPDLGFADRDYFYAHVDQSIGTFIGTALAPRPPYQGARFFGVSRRRDSDDGNFIGVIQASVLPEYFESFYARIGSDPGSFFAMGRADGAVLAHFPRLDRDLRLDPGGPVGQKIASSPEHGLMTIVWPPDGIERRIGYRRITDYPIYVSAGLETSAIRARWLATIGQHLVFGIPATALLFLLLAFAFRRTQHLHAEAAARREAEEALKHSQRLEALGQLTGGVAHDFNNLLTVIRASVDLLNRPQLTEERRQRYITAIADSVARAAKLTSQLLAFARRQTLKPEVFDVGARVHSLHDMLATLLGSAIEIVMRLPAEPCLVNADAGQFETALINMATNARDAMQGKGRIVFRVEPTTTVPQTLPQLSANQALADHGFVCVTVSDTGVGIPAARLGRIFEPFFTTKQVGHGTGLGLSQVFGFARQSGGEVTVASEVGRGSAFSLYLPRVSPDLLPQQQAPHTAPAVAGSGMSVLVVEDNIELANFAADGLTELGYSITLVDNANDALAELVMDADRFDVVFSDVALPGMTGLDLAKAVRDRGIGVPVVLTTGYSQALSQEGTAGCDLVQKPYSIEELSRVLHHAARLGRVRDGAAE

SEQ ID NO: 15673 - protein, 537 aa, BradyrhizobiumColbertium
MNDFLPSDLPEFADRVAANQRRLNEDSRGSYDFIVCGAGSSGSVVARRLAENPAVTVLLIEAGGSDDVPTVMDPAAWPGNLGSAMDWGFVAEPNPHLNGRALAMSMGKVLGGGSSINVMLWARGHRSDWDFFADETGDQSWGYDAVSTIFRDIENWQGPPDPRHRGTGGPVFVQPSPDPGPAALAMLAAAREIGIPTFESPNGEMMEGEGGCAVTDILVRNGRRNSIFRAYTYPFLDRPNLTLLTGTHVSRILLERGRAVGVEAIRHGRPLRINASREVVLALGAIQTPSVLMRSGIGDEKELGRLDISLVQHLPGVGQNLQDHVSFGCIWEYREPIAPRNTGNAATLYWKSRSTLKTPDLLFCQVEFPVPSRETAGRAPAHGWTMFAGLALPKSRGRVRLRSAEPLALPQIEANMLSHPDDVTTAVACVDLCRTLGNTRAFEPLVARESLPGPLGAAGMERFVRDSAVTYWHQTCTAKMGRDAMSVVDSRLKVYGIDRLRIADGSVMPRITTGNTMAPCVIIGEKAARAMRSEHGI

SEQ ID NO: 15674 - protein, 442 aa, BradyrhizobiumColbertium
MPSGSKTVYQIYQIYHNHRIYQNSTEVPLSTQAGARHCEVWGKAGRHAAGGKMDSMAKEILTTAGAAKILGVSIRTAQLLIEGGSIPSWKTPGGHRRVYRRDVLGLISGPGALPPLASARVVVIARPERIVDYEAALANVKACVVESYSDPYAALLAIGTRLPAAVVVEAEASGASRRAMLESLRGDPALGRTKILVVGASAADRTVDGIGPDIRTTVFVDGLPALPEAIDTIFRAAIEHPAPFETPPSFPFPDNEGERLLALERSGLIDTPPEDSFDRLTWLAARSLDAPVALLTLLTPNRQWFKSRYGLDMSDTPRDWAFCNYTILQKGVMVAENLATDPRFSENPAVLGELGFRFYAGCPVSDPDGFTLGSLCVIDTRPRTLDDTQKQTLANLAALASDEIKLRATDRQLRWAIDQGVSKAGVAVAQPPLGTKRLAEHH

SEQ ID NO: 15675 - protein, 260 aa, BradyrhizobiumColbertium
MVEFALPKNSKISGGKTWPKPAGAAELREFKVYRWNPDDGKNPSVDTYYVDTNDCGPMVLDGLIWIKNHIDPSLTFRRSCREGVCGSCAMNIDGQNTLACTKSMHEVKDGAVKVNPLPHQPVVKDLVPDLTNFYAQYASVEPWLKTTSPTPQKEWRQSHEDREKLDGLYECILCACCSTSCPSYWWNSERYLGPAALLQANRWVSDSRDEATGERLDNLEDPFRLYRCHTIMNCAKACPKGLNPAEAIAELKLKMVERQI

SEQ ID NO: 15676 - protein, 611 aa, BradyrhizobiumColbertium
MAAEINGKGNGAPATNGKAYPIEDHTYDVVVVGAGGAGLRAVVGCSEAGLRTACITKVFPTRSHTVAAQGGISASLGNMHKDDWRWHMYDTVKGSDWLGDQDAIEYMVRNAPEAVYELEHWGVPFSRTEDGKIYQRPFGGMTTEFGKAQAQRTCAAADRTGHAMLHTMYGQSLRHAAEFFIEFFAIDLIMDDQGTCRGVIALKLDDGTLHRFRAQTVILATGGYGRAYASCTSAHTCTGDGGGMVLRAGLPLQDMEFVQFHPTGIYGSGCLVTEGARGEGGYLVNSEGERFMERYAPSAKDLASRDVVSRAMTIEIREGRGVGKKKDHIFLHLDHLDPAVLAERLPGISESAKIFANVDVTREPIPIVPTVHYNMGGIPTNYHGEVLTKKDGDDNAVIPGLMAIGEAACVSVHGANRLGSNSLIDLVVFGRAAALRLAEKLTPNGKQPELPANSAEMALGRLDHFRYASGGTPTAKLREGMQHVMQNNCAVFRTGDVLSEGQNLIAKVHSGITDIGVSDRSLVWNSDLVETLEFDNLISQAVVTMNSAANRTESRGAHAREDFSERDDKNWMKHTLAWLDDAGKVRIEYRPVHNYTMTNDVQYIPPKARVY

SEQ ID NO: 15677 - protein, 138 aa, BradyrhizobiumColbertium
MSFDESHGSPKRPSMRTPLGRVRNLGAAHSGTSDFWRQRITGVAMTLLIIPALVIIVMLLGRNQVYAAQTLSSIPVAVILLLFIFASAWHMKIGMQVVIEDYVHNEKLKLTAIMLNNFFSVAVALASTYAILKLSSGV

SEQ ID NO: 15678 - protein, 111 aa, BradyrhizobiumColbertium
MALSIVHRATGIALYVGTLLLVWWLVAAASGPTAYAHVQAFAGSIIGRLIVFGYTWALMHHMLSGIRHFVWDLGYGFKPNEREALTWGALIGGIALTVLIWIIAYANGGGR

SEQ ID NO: 15679 - protein, 286 aa, BradyrhizobiumColbertium
MIPALDLKEIVELTLLLIATGAASGFLAGVFGIGGGAILVPVFYECFRIAGVPLEVRMPLCVGTSLAVIIPTSIRSLRAHYKRGAVDMTILRVWWLPILIGVVIGSVVARYAPERLFKIVFVAVAWSAAVRLIFARETWKLGDDLPKGPLMRVYGLCVGLLSTLMGIGGGLFSNLLMTFYSRPIHQAVATSSALAVLISIPGALGYIYAGWPAAATYPGVAALQVPFALGYVSLIGAVLVMPMSLVTAPLGVKAAHAMSKRTLEVAFGCYLLIVGGRFVLSLLGGL

SEQ ID NO: 15680 - protein, 66 aa, BradyrhizobiumColbertium
MLSGSDRIEGIGNLRDWLGSEVRLKDQSALRFLGSSLFPVIARSTCGEAIQNRSPETAWIASLRSQ

SEQ ID NO: 15681 - protein, 509 aa, BradyrhizobiumColbertium
MNQAANANLFSRLFDGLDDPKRLAIETYDGAHISYGDLIARAGQMANVLAARGVKPGDRVAVQVEKSVANIVLYLGTVRAGAVYLPLNTAYTLNELDYFIGDAEPSLVVCDPSKAEGLAPIAGKVKAKVETLGADGKGSLTEAADKAGSEFTTVPRASDDLAAILYTSGTTGRSKGAMLSHDNLASNSLSLVDYWRFTDKDVLIHALPIYHTHGLFVATNVTLFARASMIFLPKLDPDLIIKLMARATVLMGVPTFYTRLLQNPALSHETTKHMRLFISGSAPLLADTHREWSARTGHAVLERYGMTETNMNTSNPYDGERVPGAVGFPLPGVSVRVTDPETGKELPRDEIGMIEVKGPNVFKGYWRMPEKTKAEFRPDGFFITGDLGKIDAKGYVHILGRGKDLVISGGFNVYPKEIESEIDAMPGVVESAVIGVPHADFGEGVTAVLVRQPGASIDEATVLKGLDGRLAKFKMPKRVFVVDELPRNTMGKVQKNILRETYKDIYAKK

SEQ ID NO: 15682 - protein, 253 aa, BradyrhizobiumColbertium
MSKSGKRVAWVTGGGSGIGEAGAEALAADGWTVVVSGRRKDALDAVVAKITKAGGAAEAIALDVSNAAEAQKAADQIVARHGRIDLLVNNAGINIPKRSWRDMELEGWDKLVQVNLNGVLYCMRAVLPTMRKQQDGSIINVSSWAGRHVSKMPGPAYTTTKHAVLALTHSFNMDECVNGLRACCLMPGEVATPILKLRPVVPSEEEQAKMLQPEDLGRTIAFIASMPARVCINELLISPTHNRGFIQTPNSRD

SEQ ID NO: 15683 - protein, 184 aa, BradyrhizobiumColbertium
MSKRIAYLAAAAFSALAITATVVAPVSAEEKTVMVGGAAMYPSKNIVQNAVNSKDHTTLVAAVKAAGLVPTLEGKGPFTVFAPTNAAFGKLPAGTVDNLVKPENKATLTKILTYHVVPGKLAAADLSDGKKLKTAEGEELTVKKQDGKVWIVDAKGGTSMVTISNVNQSNGVIHVVDTVLMPAT

SEQ ID NO: 15684 - protein, 209 aa, BradyrhizobiumColbertium
MASLTVTDEQVGATPAKVIQPAWVRIMHWINALAMILMILSGWQIYNASPLFDFRFPREYTLGGWLGGGLLWHFAAMWLLMINGLAYLITGLATGRFRKKLLPITASGVLHDVRAALTFKLGHDDLTVYNYVQRLLYAGIIVVGVLIVLSGLGMWKPVQLYYLVMLFGDYPTARYVHFFCMAAICVFLVIHVLLALLVPKSLRAMIIGR

SEQ ID NO: 15685 - protein, 260 aa, BradyrhizobiumColbertium
MAKRPFLIPGVDRRLLIKDSLKTMPDVTRRRFIAGGASLGALTLLTGCDVIDSSSAETMLAKVSKFNDAVQAWMFNPDALAPTFPESAITKPFPFNAYYDLDDAPDIDGKDWKLEVRGLVDNKKSWTLDELYQLPQVTQITRHICVEGWSAIGSWTGTPLRDFLKLIGADTRAQYVWFQCADKDGYNSPLDMRSALHPQTQMTFKYANDILPRAYGFPMKIRVPTKLGFKNPKYVVSMEVTNDYKGGYWEDQGYNSFSGS

SEQ ID NO: 15686 - protein, 398 aa, BradyrhizobiumColbertium
MHAPDRPPYAHPARLILTLSLAATVGLGIGRFAYALVLPDMRENLGWSYSAAGFMNTINAVGYLAGALMASRLIQRVGWSAAIRGGTLACVAALATCALTGNFVALSLARLVLGLGAAAGFVAGGALAATIAQSRPERANFLLSLFYAGPGIGILASGLISPFTLQYFGSGSWWIVWWALTLLSIAMTIPLFLIRIESGVRFSEGGHASFAIRPVLIYLAGYFLFGAGYIAYMTFMIAYVRDGGGGAAAQAAFWGLIGLSAFVTPWAWRGVLALDRGGLATAIILGTNALGAALPMLGHSPAWLAVSAVVFGVAFFAVVGSTTAFVRFNYPPEVWPTAIAAMTISFGVGQTLGPIAVGAITDALGSLSYALNVSAALLALGAVAALCQRKVGPKANSE

SEQ ID NO: 15687 - protein, 51 aa, BradyrhizobiumColbertium
MGRHGRVLFDPLSSFRGARKASEPGIHQATAQAGKWILRCAIAHHSSRAPE

SEQ ID NO: 15688 - protein, 370 aa, BradyrhizobiumColbertium
MATHKLLLLPGDGIGPEVMGEVKRLIDWLNSAGIARFETDTGLVGGSAYDAHKVSISEGDMAKAKEADAVIFGAVGGPKWDAVPYEVRPEAGLLRLRKDLALFANLRPAVCYPALADASSLKREAVEGLDIMIVRELTGGVYFGEPKTITDLGNGQKRAIDTQVYDTYEIERIGRVAFELARKRKNKVTSMEKRNVMKSGVLWNEVMTQVHKREYPDVTLEHQLADSGGMMLVKWPKQFDVIVTDNLFGDMLSDIAAMLTGSLGMLPSASLGEVDVKSKKRKALYEPVHGSAPDIAGKGLANPIAMISSFGMALRYSFDMGDLADKVDAAIAAVLASGLRTADIKSEGTTSASTTQMGEAILKELQKLHA

SEQ ID NO: 15689 - protein, 128 aa, BradyrhizobiumColbertium
MSSKFSAANKLATLLAAGAAIAIAFATPASADTKTKRYYDERGRPYYGPSGPNAVYQQGRTRIYVSKRSWLDGGTEVNPGDRKFTDYAFPPAVGYPSFARENLNRPIDRQPLSPPQDVGGYPQTFPLY

SEQ ID NO: 15690 - protein, 262 aa, BradyrhizobiumColbertium
MQSPEASTAVSPTQIHLTLLAFADEVVGTLAHLIAYVGALALFAILGVAALGHLPELRGDQPAPRPGWGVAGRSHPAFTLSRFDSADKTMSYTILRHPEGGRKDVLRWADAAGKPVAELEVYREGAEFDVARPATADLAVQMGAEASTPFELAGLIDTKFGPVALFRPTGTMEGERACLGYLKRSEEPALQISGFSCRGDTLPARRAAIACTLNRLTLLTSGNEPKLAELFARAELKRRGCDPAAAADWLLGHANAQLRGTL

SEQ ID NO: 15691 - protein, 344 aa, BradyrhizobiumColbertium
MGYKVAVVGATGNVGREMLNILDERKFPADEVVALASRRSVGVEVSYGDRTLKVKALEHYDFSDVDICLMSAGGAVSKEWSPKIGAAGAVVIDNSSAWRMDPDVPLIVPEVNAGATEGFKKKNIIANPNCSTAQLVVALKPLHDKATIKRVVVSTYQSVSGAGKDAMDELFSQTKAVYTNDELVAKKFPKRIAFNVIPHIDVFMEDGYTKEEWKMMAETKKILDPKIKLSATCVRVPVFVGHSEAVNIEFENPISADEAREILRKAPGCLVIDKQEPGGYATPYEAAGEDATYISRIREDATVENGLVLWCVSDNLRKGAALNAIQIAEVLINRKLISAKQKAA

SEQ ID NO: 15692 - protein, 213 aa, BradyrhizobiumColbertium
MMTFPKHLLEGYKAFATQRLPTEQTRYRELSVKGQAPEVMVIGCCDSRVSPEVIFDVGPGELFVVRNIANLVPVYQPDGNAHGVSAALEYAVTVLKVKHIVILGHAQCGGIRAFVDKIEPLTPGDFIGRWMQMFIKPGEVVEQRDHETMAQFVERIEKAAVFRSLENLMTFPFVRKAVESGHMQTHGAYFGVAEGSLFVLDKASKEFKKANGE

SEQ ID NO: 15693 - protein, 293 aa, BradyrhizobiumColbertium
MTRPRRSHLFMPGSNPRALEKARNLAADGLILDLEDSVAPEAKAAARDGIAAAIAAKGFGKREILIRTNALDTPWWVDDVAMAAKASPDGILVPKVSSIEDLGTIGRKLAELGAAPTVKVWAMIETARAVLHAEELAAAGRDPSCRLSGFVFGPNDISRETRIKMLPGRAAMIPMITHCILATRAHGLEILDGPYSDIANPDGFATECAQGRDLGFDGKTLIHPSQIDACNAIFTPPEEEIARARKIIAAFELPENASRGAIRLDGAMVERLHADMARRTIDIADAIAAMGKG

SEQ ID NO: 15694 - protein, 322 aa, BradyrhizobiumColbertium
MGAVSYLDRYPLLRSRDSEFARDRLFAVYGADRFDTHDNAFGIQANLARLNSMGLAFCAYDGAASLSFPESQILRQFFSIQGGARFSTNGNSQPIEAWSPIISGDARLDLDFAPGYRQLVVRIDAAALERLLKIMIGDGSDMKLRFVGDEGDPAVMTHVRQEVFRLAEELERFGQDYSPIAIAELERALMVRILLAHRHNFSDRLQRSAPSANRTVIDLVESYIEAHWNEPLDLERIAEIANVSVRTVFREFSDTGRGSPGQFARRVRLQHAAELLRRPDEQTSVLAVAFKCGFRNLGRFASEYRRAIGELPSETLKNARRK

SEQ ID NO: 15695 - protein, 87 aa, BradyrhizobiumColbertium
MVASEVKGLANQAKQATDKIAQEIGSLNQISGDVVGSLNAIKQAINNVSEYVTSTAAAIEEQSTVTNEMSTSMQRAAAEAAAMANRA

SEQ ID NO: 15696 - protein, 493 aa, BradyrhizobiumColbertium
MLRKFIYCLALLVLAGPAAAIDRVRGDANPAIAAASDAIRRDPRDANAYYNRGNAYAASGDNERAIADYTAAIRLDPAHANAYYNRGNGYSNKGDNDRAIADYTATIRLDPAYANAYYNRGNAFSNKGDRDRAIADYAEVIRLQPANANAYFNRGNAYASKGDTDRAIADYTDVIRVDPAYANAYVNRGLAYEKRGDFAKARADFNATLGLRHGVTKWAQDKARERLAVLPSPRPSTILVEKPSAAPAVVTSDASTGDRRIALVIGNSAYENVAALPNPVRDASLVADVLKLTGFESVTLVTNLRKDALVSALREFAARAETADWAVVYYAGHGMEVGGVNYLIPIDARIAADREIGFEAVPVDQVLNAAERARKLRLVILDACRDNPFAAQMKRTMTVASRSVSRGLAPVEPEAGTLVVYAAKDGETALDGDGSNSPFAAAFVKNLPTPGLEVRRLFDFVRDDVMEATGRRQKPFSYGSISGRQDFYFVAGK

SEQ ID NO: 15697 - protein, 139 aa, BradyrhizobiumColbertium
MSTASKPYPIVQDLIDSFAGWLKHRREVNEMRQLDRADFDRIANDLRIAPDDLEELVRHGKHAADELPKMLEQLGINAEGLGRAQPLLLRDMERVCSLCEHKGQCDRDLADGTAAENYHGYCANASTLDSLNRADLAPR

SEQ ID NO: 15698 - protein, 261 aa, BradyrhizobiumColbertium
MLPEIVTFWHGPMDALRQTCLRSQLAAGHKVTVYSFDTIPGLPAGVENADAEAILPHAFSERLRPPEPDGSWRDWTILQFSDFFRMRLMAKGLGLWLDADVLLLRPIEIDSAKPYFAWERPRQLGNSVIYLPAEHGIVRAFEELMEQEELTPNWLSVRHRVTFMMRRLRGGSNRLSDIRVAIYGPAALTALARRTGELQNALPKQSFYAVHAEPKLFFDPSSYLGLVTDPAIIGLHISPKGRGGEKPIPGSLYAWATERFG

SEQ ID NO: 15699 - protein, 201 aa, BradyrhizobiumColbertium
MDKFTTLEGVAAPLKIINVDTDMIIPKQYLKTIKRTGLGKGLFSEQRYKDDGSENPDFVLNQPAYRNAKILVAGDNFGCGSSREHAPWALLDFGIRCVISTSFGDIFYNNCFKNGILPIRVAQEDLDKLFDDAERGANATLTIDLPNQEIRGPDGGKVKFEIDPFRKHCLINGLDDIGLTMEKKASIDTYEEKLKRERAWA

SEQ ID NO: 15700 - protein, 132 aa, BradyrhizobiumColbertium
MWTELKAPSLAEMEAMAHDVFERLPTEFRKLCEGVIIRVDDFPTEEVLNEMECESEFDLLGLFQGVGLPQQSLGDVARLPNMVWLYRRPILDYWAEHDESLGHIVRHVLIHEIGHHFGLSDDDMEAIEANAE

SEQ ID NO: 15701 - protein, 108 aa, BradyrhizobiumColbertium
MGGKMRAKTAVILLCMGLFSQLCVGAEAQTASSGIQVAQVVSPNEVPPPRKRSPARLRVTPYYSPDGVYPRYNPGPDAVRVCNATYVQEYRPSGTVIVPRVSCHWRRG

SEQ ID NO: 15702 - protein, 99 aa, BradyrhizobiumColbertium
MSVYAIAQLKMTDRAAYDRYQARFFEVFRKYNGRLLAADERPRVLEGVWPHDKLVMMSFPDEAAFLAFSTSPEYEEISRDRKAGAEATVLLVKGFAPAG

SEQ ID NO: 15703 - protein, 205 aa, BradyrhizobiumColbertium
MLRPKGIAALLSGLRENSMLRIFGRRAGPMRLLGLAAAATLMLSAGTARRAEALTLINPATSPAAKAATDDLVTQVRQGPGGHRFHGGGFHGGGFHRGGGHVGGFHGRGFRGGHIGGFRAAPAFHHRHVGYRHHGFRYGGYGGYHRHWGHHRPHFRHRHVYRPYYVGGYYPSYHYPRRCRIIWTYYGPRRVCHWPRWRYPYRYYW

SEQ ID NO: 15704 - protein, 69 aa, BradyrhizobiumColbertium
MATKPEYVDLISEATRQHRRRATPLRIVAKPEVEETSRLSRWPPALFRQWKLENLMRWKASSWKLRDWL

SEQ ID NO: 15705 - protein, 468 aa, BradyrhizobiumColbertium
MSKPTTLYDKIWNDHLVHEAEDGTCLLYIDRHLVHEVTSPQAFEGLRATGRKVHAPEKTLAVVDHNVPTTDRTKPNPDPESIEQIKALAENAKEFGIEYYNEFDKRQGIVHVIGPEQGFTLPGTTIVCGDSHTSTHGAFGALAHGIGTSEVEHVLATQTLIQKKAKNMRVTVDGKLPDGVTGKDIILAIIGEIGTAGGTGYVLEYAGEAIRALSMEGRMTVCNMSIEGGARAGLVAPDQKAYDFLRDRPKAPKGAAWDAAMRYWETLRSDEGAHFDHELRLDAAKLPPIVTWGTSPEDVISVTGIVPDPDKIADEAKRISKHRALKYMGLTAGTKITDIKLDRVFIGSCTNGRIEDLRAAAKIAEGKTVSGNVSAMVVPGSGIVKEQAEAEGLDKIFIKAGFEWREPGCSMCLAMNPDKLKPEERCASTSNRNFEGRQGFKGRTHLVSPAMAAAAAIAGHFVDVREWR

SEQ ID NO: 15706 - protein, 42 aa, BradyrhizobiumColbertium
MFPDPTSLAPVKRIVIDDRSRLPGRFFGRFATSATSELIRAA

SEQ ID NO: 15707 - protein, 127 aa, BradyrhizobiumColbertium
MNLIKQLEQEQFDKLSAGKTIPEFGPGDTVIVNVKVVEGDRTRVQAYEGVCIGRSGGGLNESFTVRKISYGEGVERVFPVMSPMIDSIKVVRRGKVRRAKLYYLRNLRGKSARIVEKTEHAKAAVNE

SEQ ID NO: 15708 - protein, 251 aa, BradyrhizobiumColbertium
MANPSPWRATVLALFPEMFPGPLGVSLAGRALAAGIWEIEARDIRASATDRHRSVDDTPAGGGPGMVLRADVLAAAIDAAEIGPDRPRLLMSPRGRPLTQARVAELARGPGPLIVCGRFEGVDQRVIDGRGLQEVSIGDYVLSGGEIAALALIDACVRLLPGVMGKEASGTEESFSDGLLEYPQYTRPQLFEGVPIPEILTSGDHAKVAAWRRAQSEALTAARRPDLWAQIPSKPPNRAGRQKTPKSKTDG

SEQ ID NO: 15709 - protein, 183 aa, BradyrhizobiumColbertium
MSALVCVARIGAAHGVRGAVKLWTFTEDPFAVKRYGPLLSKDGRRQFEVATAREAKDHLVATFKGVTTRDEAERLNGIELYVPREKLPATDEDEYYHTDLIGLAAVTTDGDALGRVVAIQNFGAGDIIEIAPPKGPTLLLPFSNAVVPEVDLSGGRVVIALPQEIEGEDEDASPSPPREEGGP

SEQ ID NO: 15710 - protein, 110 aa, BradyrhizobiumColbertium
MSVVIRLARAGTKKRPVYHVVVADSRFPRDGRFIERLGHFNPLLPKDNETRLKLDMDKVKAWLAKGAQPSDRVARFLDAAGVKKREARNNPEKAVPRKERKAQAEAAAKS

SEQ ID NO: 15711 - protein, 515 aa, BradyrhizobiumColbertium
MFDNLSERLGGILDRLTGRGALTEKDVDAAMREVRRALLEADVALEVVRSFTERVREQAIGATVVKSVTPGQMVVKIVHDELVNTLGAEGQTIDVNSVPPVPIMMVGLQGSGKTTTTAKLARRLVQRDKRKVLMASLDVYRPAAMEQLAVLGRDLDIPTLPIVAGQQPPQIAKRALEAGKLGGYDVVLLDTAGRTTLDEEMMAEAAAIKAAANPHEVLLVADSLTGQDAVNLARSFDQRVGLTGIVLTRVDGDGRGGAALSMRAVTGKPIKLLGTGEKTDALEDFHPDRIAGRILGMGDVVSLVERAAANIDAEKAARTAERMRKGQFDLNDMREQLLQMANMGGISGLMGMMPGISKMKNQIAAAGIDDKILKRQVAIIDSMTREERRHPDLLKASRKKRIAAGSGQSVEHVNKLLKMHRNMADVMKAMGSGKRGPLAGIAQAMGFGGGMKPPSPEEMKALQEKMQSGGGQGLPNLPKDLPAGLRQGLPNLPGLTGLSGKPTLPGLGGFPGKKK

SEQ ID NO: 15712 - protein, 57 aa, BradyrhizobiumColbertium
MSCSLKKRSSKHLCARGRTALSGVDLRPPGPVGGSKRKPFRESVGVKRRSRPKVKES

SEQ ID NO: 15713 - protein, 75 aa, BradyrhizobiumColbertium
MIGGGAVIGFHAGHPEGAVQKPEGGWAAKQASWGSPDGKTSPAIWAGPAEKEPIAKASHFQHLALAPAPRPPNFP

SEQ ID NO: 15714 - protein, 326 aa, BradyrhizobiumColbertium
MKTYDGPASDHFNGRHFFDPDGAPPKSLREVLRWQFGGKRQRAKWPAWAPSPHADTPPARVEGDKVRLSFVGHASWLIQAGGLNILVDPVWSMRVSPVSFAGPRRHNDPGIAFEKLPQIHVVLVSHGHYDHLDIATLSRLAKNFAPRVVTPLGNDVTMRGADPTIQVEAFDWHDRIELGGGIAVHLVPTRHWTARGLFDRNKALWASFVLETPAGKIYVVCDSGYGDGRHFRRVAERHGKLRLAILPIGAYEPRWFMRDQHMNPEDAVKALLDCGAEAALGHHHGTFQLTDEAIDAPAKALLEALDAAEIPQQRFVAMKPGQVVEI

SEQ ID NO: 15715 - protein, 227 aa, BradyrhizobiumColbertium
MKKPALLATVFATVLLTAPARADDFPSAITVSGEAMISAAPDLAQIDAGVANDAKTAKEASDANNAAMGKVLLALKGAGIAEKDYQTSRLSLQPQYGQNKATGASPVVGFRASNRVTVKIRDVAKVAAIIDTLVGAGANDIGNISFEVTQASKLLDDAREQAVADARRKADIYARATGVTLGAPLSVSEGGAPVPLFKTRMAERMAAAPQAAVAPGEETLSVTVNVS

SEQ ID NO: 15716 - protein, 156 aa, BradyrhizobiumColbertium
MQTADPFGLETTLESRKVVMVKGTANWDSAFDTLIDAFKALNTLLDKQGIKPAGNSMIVYTSTDDTGFTFLAQIPVDQDPKNLPKDMSIGKSPEGKALKFVHRGSYDNMDNTYEAITNHLDDKRLEAKDTFIEEYLTDPLKTAEDKLVINVFVPLK

SEQ ID NO: 15717 - protein, 291 aa, BradyrhizobiumColbertium
MSALANHAFAKMNGIGNEIVVVDMRDSAGGVTPEDARAVASARGGIAYDQLMVLQKPRLDGTEAFIRIYNNDGSEAGACGNGMRCVVRRIFEKTGQTTATFETAAGLLNAWQGPAADLYTVDMGVPKFGWQDIPLAEEFRDTRYIELQIGPIDNPILHSPSVVNMGNPHAIFWVEDVNAYDLSRFGPLLENHPIFPERANITLAHIVDREHITIRTWERGAGLTKACGSAACATAVAAARLKRAERKVEITLPGGKLGIEWRERDDHVLMTGTATFEYEGNFDPALFAPVG

SEQ ID NO: 15718 - protein, 418 aa, BradyrhizobiumColbertium
MMGVEVVTFGCRLNAFEAEVIRRKAEGAGLSDTIVINSCAVTNEAVAQARQSIRRLKRERPGARIVVTGCAAQTQSRMFADMAEVDRVVGNDDKMRGEAWREARDAFDLDASEKIAVSDIMSVKEMAPHLVDGYASGLPRVFVQVQNGCDHRCTFCIIPFGRGNSRSVPMGAVVEQVRTLAQRGHAEIVLTGVDLTSYGADLPGAPKLGMLTKQILRHVPELKRLRISSIDSIEADNDLLDAIAGDARLMPHLHLSLQSGDDMILKRMKRRHSRNDAIAFCETVRRLRPDIALGADIIAGFPTETEEMFARSLALVEECGLTFLHVFPYSPRPGTPAARMPQVAGGAIKERAKRLRAAGEAALRQRLRAEVGATRDVLIESAGQGRTEHYLPVAVAGERVGSIVPLRIASTDGERLTT

SEQ ID NO: 15719 - protein, 370 aa, BradyrhizobiumColbertium
MTTKAGLSIIDEVESAIRAGSAEKGLATARRVTDLFLSSAGSFDDEQIALFDDVLERLIGTIELRAIADIGARVALAEISAQLAPIAQAPPSVIRRLANNDEIRIAGPVLQESARLDDAELVKIASSKGEAHLLAVAGRWWLKEIVTDALLARRYPSVSRRLAANPGARVSGNGFAVIVGQAESDPELAVSVGVRVDLPSDLRRQLLRSATDAVRTRLLSRAPPHLFEEIQSAIAAVTIGVAREMSGVRDLEGAKRAVANLKAAGQLDEPTLLGFARQRRYEETMAALAALSGSTVEVIRPLMQSLREDGLLVPCKAAQLRWETTVAVLESRFATGAMKPADLARAQGLYARMTTENAKRTLRFWQVRAS

SEQ ID NO: 15720 - protein, 233 aa, BradyrhizobiumColbertium
MLDVPELTADEILSRVLHRDGLMLVINKPAGLPVHRGPKGGPNLEHSFDALRFGLPRPPVLAHRLDKDTSGCLVLGRHRKATASLGLLFKHGKIGKTYWTVVEGGPAEDEGTIDMPLGRLNAERGWWQKPDPEGQRAITNWKVLGRGGGLTWLAMEPVTGRTHQLRVHSAESGWPIFGDNIYGNGPRFGEPRLHLHSREIVVPISRNKEPVRVVAPAPPHMHEKLMACGWNGE

SEQ ID NO: 15721 - protein, 314 aa, BradyrhizobiumColbertium
MNDTSETPKLSWWRRLSNGLKRTSSSLGTAVADLVTKRKLDRAMLDEIEDVLLRADLGTAVSVRIADAVGAGRYDKAISADEVKDVVATEVERVLAPVAKPLEVDKAKKPFVILVVGVNGSGKTTTIGKLSQKFASEGRKVMLAAGDTFRAAAIEQLKVWGERTRTPVIAGAQGSDSASLAFNALTAAKEQNIDVLLIDTAGRLQNKAELMNELEKVVRVIRKVDATAPHAVLLVLDATVGQNALSQVEAFHRTAGVTGLVMTKLDGTARGGILVALAEKFKLPVHFIGVGEGVDDLAPFTARDFAKAIAGIES

SEQ ID NO: 15722 - protein, 200 aa, BradyrhizobiumColbertium
MDKTQPHPMFKLATELGPLLVFFFVNAKFNLFAATGAFMVAIAVAMTASYMVTRHIPIMAIVTGVVVLVFGTLTLVLHDETFIKVKPTIIYGLFAAILGGGLLFGRSFIAVMFDQVFNLTPQGWRILTLRWALFFAGMAVLNEIVWRTQSTDFWVNFKVFGVTTLTMIFAVAQLPLTKRHHLEPVSLETSEAEAGDVSKG

SEQ ID NO: 15723 - protein, 197 aa, BradyrhizobiumColbertium
MSDQPSSAPPRRRTFLMVLPLIAFLALALLFWFRLGSGDPSRIPSDQRGRPAPQTVLPPLEGLQAGNAQVPGLDPAAFKGKVSLVNVWASWCVPCHDEAPLLTELAKDKRIQLVGINYKDAADNARRFLGRYGNPFSHVGVDGNGRASIEWGVYGVPETFVVGREGNIVYKLVGPITAQNLKTVLMPELEKALKAGS

SEQ ID NO: 15724 - protein, 59 aa, BradyrhizobiumColbertium
MSLGPYASFIVTSYAAAALVVAILIGWVMLDYRSQTQRLRELEERGITRRSGRSATELR

SEQ ID NO: 15725 - protein, 243 aa, BradyrhizobiumColbertium
MTLIDLANPTRFLALTARLLPWLAAATVILLAIGLYQSASAPDDYQQGATVKIMFIHVPNAWLAMFVWGVMSIASLGTLVWRHPLADVAAKAAAPIGAAFTFLALLTGSLWGRPMWGTYWEWDARLTSVLILFLMYLGLMALWRAVDDPSRAARAAAVLTLVGAINLPIIKFSVDWWNTLHQPASVMRMGGSALDKSFLIPLLVMAIAFTLLFVTLHLAAMRNEILRRRVRSLQMMQASQKAA

SEQ ID NO: 15726 - protein, 222 aa, BradyrhizobiumColbertium
MTALSALVRRDIRIALRVGGGALIGVLFFLTVVLLMPFAVGPDLALLSRLGPAILWLGALLASLLTLDRLFMADHEDGSLDLITMSRTPLELACAAKALAHWLAAGLPLIVATPVLGLLLNLDMVATGAVALTLLAGTPALTFTGMIGAALAVTLHRGGLLMAVLVLPLSIPVLIFGVAASQAVIVGPMTFGAPFSILCALSLVSLVIGPFAAAASLRHGLD

SEQ ID NO: 15727 - protein, 208 aa, BradyrhizobiumColbertium
MSGTTQGKMQLSGRGLICVRGGREVFSGLDFAAAAGEAVSVVGRNGAGKTSLLRLIAGLLVPAAGTIVLDGGDGELTLPEQCHYLGHRDALKPALSVTENLTFWADFLGGERADPAETLATVGLDHATHLPAGFLSAGQRRRLSLARLLTVRRPVWLLDEPTNALDVAGQDMFGGLMRQHLSRGGMIVAATHAPLGIESRELRIGGVA

SEQ ID NO: 15728 - protein, 906 aa, BradyrhizobiumColbertium
MTSLDSFKCKKTLKVGAKTYVYYSLPTAEKNGLKGISKLPYSMKVLLENLLRNEDGRSVKKDDIVAVSKWLRKKSLEHEIAFRPARVLMQDFTGVPAVVDLAAMRNAMQKLGGDAEKINPLVPVDLVIDHSVIVNFFGDNKAFGKNVAEEYKQNQERYEFLKWGQKAFSNFSVVPPGTGICHQVNLEYLAQTVWTKKEKMTVGKKTGTFEVAYPDSLVGTDSHTTMVNGLAVLGWGVGGIEAEACMLGQPLSMLLPNVVGFKLKGALKEGVTATDLVLTVTQMLRKLGVVGKFVEFFGPGLDHLSVADKATIANMAPEYGATCGFFPVDAAALDYLKTSGRSSARVALVQAYAKAQGLFRTAKSPDPVFTETLTLDLGDVVPSMAGPKRPEGRIALPTVADGFSLALASEYKKAEEPAKRFPVEGKNFDIGHGDVVIAAITSCTNTSNPSVLIGAGLLARNAAAKGLKAKPWVKTSLAPGSQVVAEYLANSGLQPYLDKVGFNLVGFGCTTCIGNSGPLPEEISKAINDNGVVAAAVLSGNRNFEGRVSPDVQANYLASPPLVVAYALAGSVTKNLATEPLGEGKDGKPVYLKDIWPTTKEINAFMKKFVTASIFKKKYADVFKGDTNWRKIKTVESETYRWNMSSTYVQNPPYFEGMKKEPEPVTDIVEARILALFGDKITTDHISPAVSIKLPSPAGKYLSEHQVRPADFNQYGTRRGNHEVMMRGTFANIRIKNFMLKGADGNIPEGGLTKHWPDGEQMSIYDAAMKYQEEKVPLVVFAGAEYGNGSSRDWAAKGTRLLGVRAVICQSFERIHRSNLVGMGVLPLTFEEGTSWQSLGLKGDEKVTLRGLVGDLKPRQKLTAEIVSGDGSLQRVSLLCRIDTLDELDYYRNGGILHYVLRKLAA

SEQ ID NO: 15729 - protein, 258 aa, BradyrhizobiumColbertium
MTTMTASHLIPRWSGALWSGALGICAIIAVIRPAHADPRAVVELFTSQGCSSCPPADQIIGDLSKDPSIIALSMPIDYWDYLGWKDTLADSRFSARQRAYSRMRGDREVYTPQVIVNGSTHVIGSDRAGIERAIGKADKGTGVMSVPVTMSLSGKQINVSVAASKEPAVSRGEVWICSIAKSVPIAITRGENRGQQVTYHNVVRNLLKVGDWTGRPESWTVPIENLTRDGVDGAVVYVQDGSREKPGPMLGAAYTSLH

SEQ ID NO: 15730 - protein, 123 aa, BradyrhizobiumColbertium
MSLMSEDADPSEQRAAARPAALNAQANRVTFNRLELHRILNLYGRMVADGEWRDYAIDFLKDRAVFSVYRRASEVPIYRIEKDPRLARKQGMYSVISATGLILRRGHELERVLLVIDRKLAVV

SEQ ID NO: 15731 - protein, 176 aa, BradyrhizobiumColbertium
MSAPEIRPTAEADLPAITAIYQQAVREGTATFELEPPDLAEMTRRYRALVDGGYPYLVAMLDGRVAGYAYAGAYRPRPAYRFTVENSIYLDPSFHRRGVGSLLLERLISECEARGFRQMIAVIGDSANAGSIGVHTKSGFKMIGTHPNVGLKFGRWLDTVMMQRDLGEGASTVPVT

SEQ ID NO: 15732 - protein, 203 aa, BradyrhizobiumColbertium
MLELAALLCSRVCHDLISPVGAIVNGLEVLDDDPKPEDREFALDLIRKSAKTASARLQFCRLAFGAAGSSGAQIDLGDAQTMARGHIEDGKCSITWNLPRLLLPKNRVKLLLNMLVVAQHTIPRGGMLTVDPIGEGETMSFRITASGHNARLPQNISELLSGERGPAADAHAIQPYYTRLLAEACGLTVKLAPEGEAITVTAS

SEQ ID NO: 15733 - protein, 274 aa, BradyrhizobiumColbertium
MNRIVDESAAFGLMEPLTALVVKAGEAILAVNRAAMQIEGKQDGSPVTEADLAADRIIADGLEQLAGDLPTLSEERTQLASPPFQGSFFLIDPLDGTKEFVAGRDEFTVNLALVTEGVPLLGIVSAPALGLLWRGIVGRGAERVDFNGATISTAKPINTRKLPARGEPWIAAVSRSHGDPKSEAFIDSRPNAVRRTVGSAVKFGRIAEGSADVYPRFGPTSEWDVGAGAAVVAAAGGRVTDGKGGELRFGQRSDTGFIIPDFIAWGDPQAVGCY

SEQ ID NO: 15734 - protein, 161 aa, BradyrhizobiumColbertium
MRPGIALIGRLVCLLAGLWIAGAVVPAKAATTERIVVNRFTGTAIEGFDPVAYFVDGVAMQGTAEFEANLWGAVWRFRNEGNRASFLAHPEIYGPQFGGYDPADIARGVTIAGNPYFFAIVAQRLYLFSREANRDAFVANPERFLYEVRKRWPALREQLGQ

SEQ ID NO: 15735 - protein, 201 aa, BradyrhizobiumColbertium
MTFASRLAALALAAMVGWIVPASAQNAPPPDLPPPQRTPTPNTYGPDELVGAGHRFFGNVSRGLASIIEKAVSQWGLPNGYILGEEGSGAFVAGLRYGEGTLYTKNAGDLRVYWQGPSLGFDWGGDGARTMTLVYNLPATNAIYQRFAGIDGSAYIIGGFGMTALTANDIVLVPIRSGLGLRLGANIGYLKYTPRATWNPF

SEQ ID NO: 15736 - protein, 432 aa, BradyrhizobiumColbertium
MVEPIMYLAIGFLLSMLCGLAIVPLVHNRAVRLTTRRLEAATPLSMAEIQADKDQLRAEFAMSARRLEMSVEQLKNKTTSQLAELGKKSDAINRMKIELGEKNATIFALEAREKAVKEQLRATEEEFNAKTAALREAEIALADKQAELAKINTELSDRSMMAESRQVELIAVRTQIEELKSRVGDAEKEFAATQARLAQERIESETASRELGEARGRVENLSQRVTELDRQLIIQVKEAEMLSARVADLEGRLATQGKLLAERDYENNQLRQANDSNERTIKELRVEIAALSGGRSSAAMEQLRAEKSALEEQLRTARDERAKLQRDINAIQQQAESSWATERMENALLRERINDIAAEVAKLAMQLEGPNSPIEALLAAEAGQPAKPAPRPANDAATNGAPAARLPEGGGTLAERIRALQAHASRARQQGA

SEQ ID NO: 15737 - protein, 257 aa, BradyrhizobiumColbertium
MAIVFITGSTDGLGRAAAQSLLDQGHRVVLHARSADRAAALGGLASRAAGLVAGDLGSAAETKSIADQVNAIGRMDAVIHNAGVYTRPSRGSTPEGHAETLAINTLAPYMLTALIERPGRLVYLSSGLHRGGEGSLDDLDWTKRAWDPAKAYAESKLHVVALAFALARRWPDVLSNAVDPGWVRTKMGGAGAPVDIDTGQRTQAWLAVSEDSRAKVSGRYWHHLEQQQPAGEATDEEFQDRLIEKLSKLTGVELPAV

SEQ ID NO: 15738 - protein, 205 aa, BradyrhizobiumColbertium
MYLVLYKTNLFDLNAIVQGANGSWWFPAFMFVCVLLESVFPYFGYFPGTALILMSVALNPKSADVSVFAVAWLAIILGAVLSYGQARFFRPLLQRVASKAALRRCESLLHAYGPYARIALFVHPNACAMYFTALGLLGGNLMRELVYLCVGATAAVGVLFVIVTRLVSAVGPTDDGQLQLLLAAALVAIGTLVGLYAALRAQRVA

SEQ ID NO: 15739 - protein, 160 aa, BradyrhizobiumColbertium
MSVAFTKEESAETASETLLPDRPISPHPNLVTEAGFKALQAQLADARAAYEAAQAIEDVNEKRRQSAVPLRDARYLAERLRTAQVVPTSVSTDVVAFGSTVTFSRADGRVQTYRIVGEDEADPKAGSISFVSPVARSLMGRAVGDVVGAGAQEIEILSIA

SEQ ID NO: 15740 - protein, 160 aa, BradyrhizobiumColbertium
MTSDDGKDAGLVAMISSILGGNKRADNITPPLLTEVPPTAPADEAVEPSPADPAPASSEPAPDAAPAATNAVEAPSKIATTRDGKQLLPAEAIADLVLGELRKLEDFPASGVSVTVYGYRNWNAMLTFAPFSTTFQNATRFRQALPDVFFKLRRFVELEI

SEQ ID NO: 15741 - protein, 112 aa, BradyrhizobiumColbertium
MQKSYLLAATAALVLVMQTPLALAQGAPAAGGTSTPAATTAPPARATTAPTATTDSASQPTDTKKSASKKPAKKKMTRQQEIDHSVETGTVPARYRSSVPKQYHQYIPFDKR

SEQ ID NO: 15742 - protein, 130 aa, BradyrhizobiumColbertium
MVEITLSVAGCVTMYLTSNASGVADTNTGMTVHQTVHWERHGTAVPPQSKEIEMRRTILTLASFATLIAASLSAAPAQAANDRYCLQGRSWGYPGNCQFATYQQCAATASGTSAFCGINPRYAYSQPYYY

SEQ ID NO: 15743 - protein, 81 aa, BradyrhizobiumColbertium
MRAFDTHYFTFGTEPSRGYGHGFQLETVMSYAVTPNANVGIGARYWHTGINDFTEPPGGAGQAQTYQVDRYGTFIQSSFKF

SEQ ID NO: 15744 - protein, 172 aa, BradyrhizobiumColbertium
MQTELNKVIAALRDFYAHEGFLFEKDVGERAITHRFAVHLEKHFSGWSVDCNYDRLGERTLHLPHGSIISTDDHLGKSIYPDVVVHQREIPNNLLAIEIRKASNHTPLEHDEHKLRALTDPHVWFAYTIGVLLVLDKPGVTLSDVYFGGAPDPALAVWFAKQLGEADLAGAT

SEQ ID NO: 15745 - protein, 488 aa, BradyrhizobiumColbertium
MHFVAALDRVPGMRCVLGLFEGVVTGAADGYFRMKGTPASTLLHLGPGLANGLANLHNAKKANSGIVNIVGQHATYHIGYNAPLTSDIEGLARPMSSWVRTSPDAKSVAADGAAAIAAAKSAPPQIATLILPADTAWNEADGIAEVPAEQQRASYSPQAVEQAAKILHGDGEGTLLLMTGSALSEQGLALAERIAGKTGCTVMGPTFRPKMARGRGRFSIDRIHYVIDQALPMLAKFRHIVLVESDDPVAFFAYPNKPSVLRPEGCDVHRMTSWGENSVAALEALADAVKASAKDVKPQALQELLKPTGALTHASIAQSIAYAIPENAILVDESLTTGRAFFPPTAAAAPHDWLQNMGGSIGFSTPLSIGAAIACPDRKVITMVGDGSAMYTIQSLWTQARENLDVVTIVFANRIYQILRGEFDNVGAGEPGQRANDMLRLDRPTLDFVAMAKGMGVPGRAVTNADEFNKALAEAVAEPGPRLIEVQI

SEQ ID NO: 15746 - protein, 81 aa, BradyrhizobiumColbertium
MHLGGAWVGEADVHPTLDHRSHQAFRTVHPKLLQPAITRYPSGSIIVRAFRQSNSRHRGPAPRDGAPVWLMVSGKLWLPIR

SEQ ID NO: 15747 - protein, 192 aa, BradyrhizobiumColbertium
MIRFFAAPIAAIALLSATAAGALAEEFDTRDIMGGGPNFFRSGANPVPRTTVMYNGNYAPGTIVVNTSERRLYLVLPNGQALRYGIGVGRDGFRWGGVHKITAKREWPDWTPPAQMLARRPDLPRHMKGGVDNPLGARAMYLGSTLYRIHGSNEPETIGQAVSSGCFRMTNDDVTDLYSRVAVGTTVVVLNN

SEQ ID NO: 15748 - protein, 278 aa, BradyrhizobiumColbertium
MRQRRDTMSAMNPPSPRLRIAFLALAAFTLVPDTAPRAAAGELPAISSRQRTEKKTFTDREIVEGFLKTAFGAEYHLAGRVDRIRKFDGPVRVFAESDRADRKTQLAKVVSDIGTRVQHLDIAMTETREAANVRVKLVRDRDLFRTLTSFYGAEKAREIRSSLDPQCLSGFRKNDSFEIEHSDVILTVDNGDFVFLDCAYEELLQSLGPINDTASVPWTMFNDNVSMGYFDVYDQYILNLLYDPRVKAGMTVAEVKAVLPAVLKDVRAWVKRVNDLKE

SEQ ID NO: 15749 - protein, 375 aa, BradyrhizobiumColbertium
MPAASYVDPRNGRLYRLDQPRWCSDERTPLLVTPGAGISREDIERRTRSLWRYRAALPVEIKSPVSLGEGCTPLLQQAWGDLRPLFKLEWFNPTGSFKDRGSAVMLSFLRQIGISAILEDSSGNGGSSMAGLGAAGGMRVKILAPASTSPAKIAQVRAYGAEVQLVEGPREESEAEAIRQSSQTFYASHNWQPFFLEGTKSLAYEMWEDLGFRSPDNVIVPVGAGSSLLGCAFGFRELLKAGQIAKLPRLFAAQPLNCSPIDASFKAGVDTPVAREVHKTIAEGTAIKNPLRLREIIGALRESGGGTIALTEDEIVAALRRLARQGLFAEPTSASAAAALDKLAAAGAIKPTETTVAVLTGTGLKAATTVADLVQ

SEQ ID NO: 15750 - protein, 92 aa, BradyrhizobiumColbertium
MQDARFQQLMPDTIHWLGLKRIDRFLSMSDMKYDAMTSQGIDIVERVPIPLELIPADAHVEIAAKKAAGYYSTDIAPEKDVNGVVGRSLEKY

SEQ ID NO: 15751 - protein, 411 aa, BradyrhizobiumColbertium
MDALEMQARSLLTAHAVRARAGQMLELGLAGRLTHFAIDLDRMDGVAEAVLTVTRKAYPTLDVPFHARWRHFVLGGADRWARLADAASWPDRAARARSEFDLAIVSVLLDAGAGAAWRYRDAVTGQAIGRSEGLAIASLDMFAGGLFSHDAGSPFRADADVLAMLQAAALASAFQASDANPLLGLEGRTDLLRRLGKLAADRPEVFGLRDTPRPGGLFDYIAAQASGGVITAPAILSAVLNQLGPIWPSRLEIAGIPLGDCWRHPAITADDATAGLVPLHKLSQWLSYSLIEPLQRAGFDVTDIDGLTGLAEYRNGGLFVDHEVLRLRDAADAQRAHAVDSLLVVEWRALTVALLDRLAELIRAKLGRTPERLPLASILEGGTWAAGRTIAFLRRPDGSPPLRVISDGTVF

SEQ ID NO: 15752 - protein, 209 aa, BradyrhizobiumColbertium
MEGVTIVDHPLVQHKLTLVRDKSISTKSFRELIKEIGMLLCYEVTRDLPLTDTVIETPLATMHSAKIAGKKLVFVPMLRAGTTFVDGMMDLVPTARVAHIGLYREPHSFAAVEYFFKSPSDLGERLAIVVTPVVATANTAVAAIDRLKERGARDIRLACLIAAPEGLERLRGFHPDVPIWTAAVDEGLDETGFILPGLGDAGDRAYGTR

SEQ ID NO: 15753 - protein, 37 aa, BradyrhizobiumColbertium
MLSIAQGENLAHCKLFHERTATERISRGCAGKRYRVP

SEQ ID NO: 15754 - protein, 70 aa, BradyrhizobiumColbertium
MTHQNDDPRTDRARRNSPVGWAVGAIFVMAVVAVVFFYNGREIGPQTTTSNPNTAPNVTTGSNPPAAPAK

SEQ ID NO: 15755 - protein, 163 aa, BradyrhizobiumColbertium
MSYGRFAAMIATSTVIMFGLMYLNTFALDHVWYSQTRTWMALLMGAVMAALMLGFMWSMYRNRTANIAILAGSAAVFLTSLWLVRSQQTVTDVAYMEAMIPHHSIAVLTSERARIRDPRVRKLADDIIEAQVREIDEMKRLIADLKEKPPSADAKDLPPRPPT

SEQ ID NO: 15756 - protein, 365 aa, BradyrhizobiumColbertium
MTEAPAQPVRPTIFFDGTSSRRREVTLTLGDALEILEDGAAPVRWAYADIRRADSPAGVLRLASTSAPSLARLEIRDAALAADLTTRCLRLDEHRTTRGGVAKIVGWSVAAAVSIVCVVLFGVPLAADRLAPLVPKPVERRIGDAAEVQMKALFGRKVCEDPAGKAAFTKLVNRLRDAAGLDDSMTAGVLPTSVPNAFALPGGKVFVLKGLLDKAETPDELAGILAHELGHLKHHDNMRGLIYNGGTSFLIGLLFGDVTGSSAVIFTSRSLVEASYSREAETGADTFAIEIMHALGRSPKPAAELMFRITGKEGGSGLTNILASHPLTEDRLARMTKEDRPASGAPLLTDKEWQALKGICGSGKV

SEQ ID NO: 15757 - protein, 384 aa, BradyrhizobiumColbertium
MNDMQWAPVGSEPLPPPLPPARVDFTGNRSEFRKLVTKGALLELVTFGFYRFWLVTDIRRHLWAHTALDGDSAEYTGRARELLVGFLVALAILVPIYLAYFLVGIEFERWQAFASVPLFLAFYAFGQFAIFRARRYRLTRTIWRGVRFWMDGSGWAYSLRAMLWGLLVLLTLGLALPWRDAALERYKMQHTHYGNLTGDFEGDGWTFFKRAWWLWLLSPIALVVFPLAPFFFAEFKARQWRWWLDGIRIGDVSLSSRLPHDAFYGLYWKVVGWWTLLTIAFIAYIAGGAFLLVALSGVPAEEVFGGDNAAKSIPMVVIMVLGYFALALAINIVMRVYLQRDLWAKVLETIEVHNIAAAADVRGSAQLAGALGEGFADGLDVAGF

SEQ ID NO: 15758 - protein, 421 aa, BradyrhizobiumColbertium
MHGTIESAAKLDVLRARATSLPLEQFDPGDPELFRTDTFWPYFDRLRREDPVHYCKDSMFGPYWSVTRYNDIMEIETNHAVFSSASALGGITIRDIDPDLRRESFISMDPPRHAAQRKTVAPMFTPTHLDNLAINIRKRSAECLDNLPRGEVFDWVDRVSIELTTQMLAVLFDFPWEDRRKLTRWSDVATTIPGPGGLVATEDERMAELTECAAYFSRLWKERAEQPPKSDLLSMMAHGAATRDMDAKNFLGNLILLIVGGNDTTRNTMSGSLLALSQHPEQYRKLRDNPDLLDSFVPEVIRWQTPLAHMRRTALSDFEFRGKQIKKGDKVVMWYVSGNRDEEVIERPYDFIIDRARPRTHLSFGFGIHRCVGMRLAELQLRIVWEEMLQRFDRIEVVGEPKRIYSSFIKGYESLPVRIAG

SEQ ID NO: 15759 - protein, 306 aa, BradyrhizobiumColbertium
MDFRQLRTFSCVAELGSLSKASDTLRVAQPALSRQIKLLEHELRTELFTRNGRGMVLTEAGRLLLARTSGIVRQIDQIRDDIQSAKGPPSGQVVLGLVPTVSCVLSARFARRCVEKFPGISLRIVESYSGHLVEWLHRGEMDLAILYGRSADLHLNVQSLGRDNIVAVGPRGCGLARKSSVDIGWLLRQRLVLPSHSHGLRALIEHAAAQRKIKLNVQLEADSFRVLTSLVEEGLGFALLPPSSVHGEVADGRLETTAVSKPMSRELIFASPIDRPVSTASLAITALLREEVAACRKEGVWDIKLS

SEQ ID NO: 15760 - protein, 389 aa, BradyrhizobiumColbertium
MSQEHHTEDYADIRDAVAKLCAQFPGEYWRKLDREMAYPKAFVDALTEAGYLSVLIPEEFGGAGLKLSAAAAILEEIQRAGCNGGGCHAQMYTMGTVLRHGNAEQKAKYLPKIASGELRLQAFGVTEPTSGTDTSSLKTFARKDGNDSYIVNGQKIWTSRAEHSDLMILLARTTPKEQVKKRTDGLSVFIVDMREAKNNGLEIRPIRTMMNHATTEVFFTDMKVPAENLIGEEGKGFRYILSGMNAERILIAAECVGDAKWFIAKATNYAKERSVFGRPIGQNQGIQFPIAKAYASMRAAELMVKEATRKYEAGLDCGAEANMAKMLAADASWEAANACIQTHGGFGFAEEYDVERKFRETRLYQVAPISTNLVLSFVAEHVLGMPRSY

SEQ ID NO: 15761 - protein, 367 aa, BradyrhizobiumColbertium
MGALDGIRVIAVEQAVAAPFCSSRLADAGAEVIKIERPEGDFARGYDAAAKGQSSYFVWLNRGKQSAVVDLTTKEGRAELEKLISSADVLIQNLKPGSMDKLGFSRERLLKDYPKLISCTITGYGDEGPYAHRKAYDLLIQAESGLASITGNPDGASRVGMSIVDVATGATAHAAILEALIARGRTGKGADIRISMFDVMADWCTVPLLNSEAGNPPKRMGLRHPSIAPYGVFTSKDGKDILISIQSEREWKTLCAKVLDQPDLPADPRVANMVERVRNRDFTDKTVADAFARMTRDELLKRLSDADIAFAEVNTMEDLTKHPHLRRIEVDTPNGRVSYPAPAPIIVGETRSYGPVPAIGENPKSKK

SEQ ID NO: 15762 - protein, 283 aa, BradyrhizobiumColbertium
MTEKLDIDHLRQWIGRSTEATDIVTAQLVKGLRATLFQEVGEPKAGDAAPFTVHWCLAQPVFPMSMLGPDGHPTRGGFLPPVPLPRRMWAGGEIEFLQPLCVGDESTRTSRIADVQVKSGSTGTLCFVSVEHSISSPRGTAIRERQDIVYREMTGTQAAPAKAPPPAPKAQHRETHVSDPVLLFRYSALTFNGHRIHYDRDYVTKVEGYPGLIFHGPLQAALIIEMAAKLHGGKAPKKFTYRGLQPLFEGTEFSVNANEIEAGMELWTANAEGQPTMKGTAVW

SEQ ID NO: 15763 - protein, 540 aa, BradyrhizobiumColbertium
MAKNGKSGSKSVTVKQATLDLLRSFRIDKVFGNPGSTELPFLSDWPDDIDYVLALQEASAVGMADGYAQATRNAGFVNLHSAAGVGNALGNIYTAHRNQTPLVITAGQQARSILPLQAFLYAERASEFPRPYVKYSVEPARPEDVPAAIARAYYTAMQPPCGPTFVSIPVDDWAHACAPVEVRKVSREIGPEPEAMQALVKALTSSKHPALVVGPGVDRAGAVDLMVRVAEKAKASVWVSPFSARCSFPERHPQFAGFLHASPAQLSDALREHDLVVVIGAPVFTFHVEGHAAIFDGGAAIFQITDDSDAAAVTPVGTSIIATMKPALSMLLDLLPESKRAMPKGRALPAAPQAADPLPVEFLLHSLSHAMPDGASLVEEVPSHRPAMQKFMPMPGQDSFYTMASGGLGYSLPAAVGMALGKPKQRTVCLIGDGSAMYSIQALWTAAQRKLPLTVVVINNSGYGAMRSFSQVMQVRNVPGLELPGIDFVRLAEGVGCHAVRVTKAAELGEALKRSLAHEGTSLVEVVVDSAVPVLYGQKH

SEQ ID NO: 15764 - protein, 258 aa, BradyrhizobiumColbertium
MSEALPTGMRMRGKVCLITGGGSGIGRATALRMASEGAEAILVAGRRAAEIEATATSCRELGTDAIALQTDITREDEVARLVGTAIERCGRLDVAFNNAGFQERRAPLEEQGTEIYDNVFDTNVRALFLCLRHQLPAMLAQGRGSIVVNASVSGMRNPNPGFSLYSASKAAAISLTRSAALENAPRGIRINAIAPGRVVTDMMLRAGVGDIATVSAGLPLRRMGSPEEVAEAVVWLSSDASSYVVGHVLAADGGFLAS

SEQ ID NO: 15765 - protein, 151 aa, BradyrhizobiumColbertium
MAELSLIDDIRAASRLMVRELGFMDATVAASDYPPSAVHTILEIGIRGPMTSGELGDFLRLEKSSVSRLVRKLIDCGELRETPDETDARSKKLSLTAKGRRTLEALHAFGRQQVRGALAALTPAEQRTVREGMMLYARALRASRVESESAA

SEQ ID NO: 15766 - protein, 264 aa, BradyrhizobiumColbertium
MQVTGKVVVVTGGANGIGKALCEAFHNAGAAKVVVADLDAANARAVAAMVDGAAFKCDVSQENDIVHVIEETERQFGPIDLFCSNAGIGGGFDPMSENAGGASDEPWQRSWAIHVMAHVYAARHLIPRMRARGGGYFLNTISAAGLLSQVGSPAYSTTKHAAVGFAENLAISHKAHNIKVSILCPQGVDTNMLRSIPKGPQSGDGDLTPEQVAKDVLAGLEQETFLILPHPQVLGYMRKKTENYDRWIGGMAKIQAKMREEFGK

SEQ ID NO: 15767 - protein, 231 aa, BradyrhizobiumColbertium
MTVFQLKQFASSSVHAAADVIGWNYDRAELIADGVIHAIGVLAGIIAATVLVVLAAVYADAADVVGVSIYVAGLLSMLVFSATYNLWPVSPAKWLLRRFDHSAIYLLIAATYTPFILEVKDSGFALVLLAGVWCVAILGIVLKLFYPGRFDRVSVGIYLAMGWSGVMIYGPVVKALPSLVLGFILAGGLLYSFGVIFHAWRRLRFQNAIWHGFVLAGAACHYTAVLDLVLS

SEQ ID NO: 15768 - protein, 489 aa, BradyrhizobiumColbertium
MAFSFQDIVEEARLSARALIDYGEHFFNPTVRLGVTGLSRAGKTVFITALINGLTRGGRFPVFEAYASGRIARVHLAPQPDDAVPRFAYESHLHALIEERRWPSSTVDISELRLVIDYQRPNGADRTLTLDIVDYPGEWLLDLPLLQKSYEQWSAESLALSREAPRAHLATEWHAHLATLKPEAREDEHATLTAAKLFTDYLRACRDERFAMSLLPPGRFLMPGNLAGSPALTFAPLDLPAGGQALDGSLWAMMVRRFEAYKDVVVRPFFRDHFARLDRQIVLADALAAFNSGPEALHDLEAALAGILDCFNIGRSTLLTSLFRPRIDRILFAATKADHLHHSSHDRLEAVLRRAVSRAVARAEDTGAEIDVVALAAVRATREAQVAHGRDRLPSILGTPAAGESAGGEFFDGNTEVATFPGDLPVDPEPLFNGTDAFRGLSTQAAGKSDFRFLRFRPPKLAREGTSEPTLPHIRLDRALQFLIGDKLA

SEQ ID NO: 15769 - protein, 342 aa, BradyrhizobiumColbertium
MNDRSQQRRPATFRLDDPAVVVAEADETGRLGRGTIQITPEHDPAMLPVPIEAALTARRRFPWGTLFWSGLAGLTLLGVGLGVVHLIEDLFARSETLGFVGLAFAFVTALALAVVIGREAFGLARLATIEKLHQRAAAVLASDDRKESRVIVQDLLQIAHQNPQLARARATLESHAGEIIDGADMIRLAERELMSPLDAEARRLVSSAAQKVSIVTAVSPRAAIDVLFVFVAALRLIRQLAYLYGGRPGALGMIRLLRHVIAHLAITGGMAASDSLVQQMLGHGIAAKLSQRLGEGVLNGLLTARLGLAAIDVTRPLPFAALPAPKLSDLATDLLRKKDGEE

SEQ ID NO: 15770 - protein, 537 aa, BradyrhizobiumColbertium
MTIAPDISEKPDGAERRLILVATFVIAAMTVLRIVYASAIELRTDEAYYWTWSKETALSFLDHPPGIAWLIRFGTAIFGDTTLGVRFGGIVAMLVTQLLLADIVRRLTHDARAIMFAVLMPEAALYYGLLMAKVAPDVAMIPFAVAMMWSLVRLTQGGDGRWWLAAGLFAGLAMLSKFTAIMFAPAVAAFLLVPEWRWRWLRSPYPYLAVLVAIAVFSPVLIWNAQHDWASFRFQGVRATANYGISPRTIGDYIGLQFGLVGFVMLPVVLTGLVMTAWRGYRKREPVAILLSTAVLVPFLYFFFKSLTLRVGDTWPMFMWPVGFAAAAVNLVLMRKEGWSARMLHSSLFWVKTAIVSGIAFVVIVFLYYVAAPWNLLGKIDPIGAEAGYEQVAARAQAALDEMGARWIATTDYRTYAMMRWLFRGRVPVIELNERGRFQDFRDPGMDKIRGEAGIYVGREPDDRSSVWEHIPAKRQLLGRVERRWRGLVMDTYVIEKLTGWTPELSPPKDSPLFRWKVLAGNSARDLRGSSSPSRGA

SEQ ID NO: 15771 - protein, 576 aa, BradyrhizobiumColbertium
MATAAAPMSELVRATGARQVRLVCGVILFAYVVSHFLNHALGNISVEAMEAGVYYHTLFWQFLPVSIIFYTAALSHMGLGIYALYQRRQFRWRTIEPLQLVLGLSIPALVMGHVIGVRLGYTLYDHQKLYPQELYLFFVAAPGRLWQMTILLLIAWVHGCIGIYFWLRLKPFFPRAAPYLLATAVLIPTLSLLGIYQGGRSIEIESDDRDWRAQNLGRRQVGTVAENNALDRIAGGLNAGYFGLLGLVLVARGVRAWRERRGGMIALSYGNGKTVRVPKGLSVLEASLRHNVPHASVCGGRARCSTCRIRVIGDHDALPTPSQREAFVLTRVGTADPSIRLACQLRPTSDLSFFQLFAPHTHSTDEASTSASIGQERYLVSLFVDMRGSTQLAEKRLPFDTVFIVNRFLGAVSQAVIENGGQPNQFVGDGMLALFGLSADPQTACRQALKAASGIGVHIDELNDLLSHDLREPIRFGIGIHGGEVIIGDIGYRDHVVFTALGDAVNVAARLQEMTKGLACEAVVSEEVRDNAGLAEDALPQQEVAIRGRDEPLAVRVVANARQLAALVDRSERVAA

SEQ ID NO: 15772 - protein, 38 aa, BradyrhizobiumColbertium
MVVTTIPARICRNHLREVNSRFRSEPMPLRYSRPVLRL

SEQ ID NO: 15773 - protein, 399 aa, BradyrhizobiumColbertium
MFDRRDLLKGAGLAAMAAALNSTKALALDTVTLPFANGERPLVKYPQKRPMIGLTSRPPQLETPFAVFNEGPITPNNAFFVRYHLSDLPYNLDPDKFTLEVKGKVNKPLKLSLKDIRKMKATEIVAVNQCSGNSRGFVEPRVAGGQLANGAMGCARWRGVPLKAVLEMAGVQAGARQVTFNGMDGPVSDKTPDFVKALDLDHATDGEVMLAYGMNGEDLPFLNGFPLRLIVPGYYGTYWVKHLNEITVIDNIYDGFWMKSAYRIPDTPNNAIEPGTAPKATIPINRFTIRSFITSVPDGAKLKAGRTTLRGIAFDGGKGIKEVQVSTDGGKTWAGAKLGKDLGKYAFREWKLPVKLTAGSHEFKVRATGTGGETQPDMPRWNPAGYLRNVVETVRVTVA

SEQ ID NO: 15774 - protein, 104 aa, BradyrhizobiumColbertium
MIMQPAVLLTIPLALALAVGAALAAPINYKTPDEVAAFKPGPSLEVVQGNCSACHSSDYIATQPPMKDKKAFWQAEVTKMIKIYGAPIDDADVGKIVDYLATTY

SEQ ID NO: 15775 - protein, 66 aa, BradyrhizobiumColbertium
MAKGTVKWFNPTKGYGFIQPASGGKDVFVHISAVQKAGLSTLNEGQTVEYEEIANRGKTSAENLKV

SEQ ID NO: 15776 - protein, 140 aa, BradyrhizobiumColbertium
MQEDGRIANVELAERIGLSPTSIGERLKRLQREGFVEGYGARLNPHRLGLGLLVFVEVLLDKTTPDNFERFARAVKLAPEVLECHMVAGGFDYLVKARLADMAAYRRFLGETLLSMPGVRETRTYAVMEEIKRDAPLPVG

SEQ ID NO: 15777 - protein, 999 aa, BradyrhizobiumColbertium
MPNTPPPFSAPYAPDDAEIAAKLLPASQPAPALEARIDRTATRLIEAIRKRDDRLGGVEDMLREFALSTKEGLALMVLAEALLRVPDAQTADQFIEDKLGEGDFIHHETKSTAFLVNASAWALGLSARVIQPGETPDGTIGRLVKRLGAPAVRTATRQAMRLMGNHFVLGETIEQALERGRPRSGQKPRYSFDMLGEGARTAADATRYFDAYASAIDTIGKAAGNHPLPDRPGISVKLSALHPRFEAISRNRVMIELVPLLLDLARRAKAHDLNFTVDAEEADRLELSLDVIAVTLADPSLAGWDGFGLAIQAYQKRAGAVIDYVDELARAHDRKLMVRLVKGAYWDTEIKRAQERGLDGYPVFTRKAMTDLNYVACATKLLALRPRIFPQFATHNALTVATVLELAAGSGGFEFQRLHGMGEALYEQLATDYPDIAYRTYAPVGSHRDLLAYLVRRLLENGANSSFVAQAADYRVPVSVLLQRPADAIGRPQAAAHPKIPLPGDLFAPERRNSRGVEFGERAALDRLLADVKAEVADLEPVVDATPDQANAAVAAARAGFAAWSRTPAAARAAALQRAAHLLESRGGHFIALLQCEGGKTLDDALSELRETVDFCRYYAAQGRKLFGGEIAMPGPTGESNTLAMRGRGVFVAISPWNFPLAIFLGQVSAALMAGNSVVAKPAEQTPRIAREAVALLHEAGIPESALHLVPGDGRIGGLLTAHPEVAGVVFTGSTEVARSINRTLAAKNGPIVPLIAETGGINAMIADATALPEQVADDVVTSAFRSAGQRCSALRLLFVQEDVADRMIEMIAGAARELKIGDPSDVATHVGPVIDEDAKQRLDAHIARMKREARLHFAGEAPDGCFVAPHIFELEDAGQLTEEVFGPILHVVRYRAENLDRALQAVERTGYGLTLGIHSRIDDTIEGIIDRVQVGNVYVNRNMIGAVVGVQPFGGHGLSGTGPKAGGPHYLARFATEQTVTINTAAAGGNAALLAGEE

SEQ ID NO: 15778 - protein, 401 aa, BradyrhizobiumColbertium
MDKGIFAGLKVLDCASFIAAPAAATVLSDFGADVIKIEPPGAGDPYRNLPNLPGYPTGEHNFAWLLEARNKKSIALDLSKPEAQAVLYKLVEEADVFITNMPPPVRAKLGITYDHLAHLNDRLIYASFTGYGEKGEEANKPGFDSNAYWARSGLMDLVRADTDTTPARSVAGMGDHPCAMAFYGAIVTALYQREKTGKGSHVASNLMANGVWAASVLAQAKLCGAKFGERRPRERALNAVANHYQCKDGRWLILSLLNEEKQFPTLAKCLGREDLINDPRFVTKADRHARSVELIKILDETFATKDLAEWRKILDGSGLVFGVVAILDDIPNDKQMLDNEVLVPFENDTMLTINSPIWIDGAKKVQPRKPPAVGEHSDEILRAAGYDEAAIRQLRSNGAVG

SEQ ID NO: 15779 - protein, 198 aa, BradyrhizobiumColbertium
MSRDSKTESGERERSLMQATLRIIGRHGLDGVTHRAVAAEAGVSLGAVTHHFGPRDALVEAALQFALAREVGRLRALALGLQDKAFEVEAWIDALVDFYVRELGTEAETHIACYEAFLAAARQPCYRPVVAEWFDTWRQSAELALKAAKSPNPRPHAELFVSALIGLLFRQLATPRAGFRREAKAELLELVGGLIARK

SEQ ID NO: 15780 - protein, 215 aa, BradyrhizobiumColbertium
MPSYRLHYFPESGNSYKLALMLTMCGETFEPLWTDFAGGVTRSAEWRKAVNEMGEIPVLEVDGVKMTQTAPLLLKLAEQYGRFGAETENEKFELLRWLFWDNHKLTGYMATYRFMRAFTEKNDPQVLKHFRRRLEDFLGILDGHLQHNAFAIGPRPTIADISMMAYLHYPSDEHGFDFAVSHPAIHAWLGRMAALSGWKPAYELLPGKRMTNYAR

SEQ ID NO: 15781 - protein, 53 aa, BradyrhizobiumColbertium
MNTSEANKERNRKIARNEEAKQVIGSARVSIWAIAMAAIVCGILFALGWLALR

SEQ ID NO: 15782 - protein, 516 aa, BradyrhizobiumColbertium
MSRILRILVAAAALLGGGVSLPAAETPQLTRGTAITDPALLRQLDQGDTLTISRLLSPERNSDVPLSTELMFASLPQLRDIPPAIDAEFDRYIAWYKATYPGETIGAGEGFDVQLFDRASLKSRDTRFVLAGIVNRMDRAFVSEESCGEIRLIYRLARFDSSPEGGKTTTRLPMTLNLAMKARDPRQTDASGKPITCAELARRWLDNGDWQGLIGSRAPPYDAMLDRIETNIQISVAPKSALHDFRSDYLLKVFKYDGATKTFWESTLENQIDRDRILADDALRREFKDWLLAPDHLREFDRGTVMIPEKFLAKGAVVPTPAGLDASALQPEFGMMQGEGNREAKGDPVFTDNDVVSALKQVAARGVDMQNVRSVAGFQRRLNDVTCAGCHQTRGIGGFHFPGVDWLADKPSHSTIVPASPHFFGDQLRRRDILAAFAAGKRPDFSRGFASRPQTRGSRELAGTQYQDGWGAHCSLQNQGPGAPDKSFTSWSCAKGLTCQAASASGRIGMCFIKTR

SEQ ID NO: 15783 - protein, 332 aa, BradyrhizobiumColbertium
MSEPLSEQDARETGVVDAAAPQAVAAAPGIDAPSIAPDHEAPPKPDPVKAEAPKVEPPRLEVSKFDAKAEARTESKAEAKPEPKLGKLIVMSPSDRGWEREEFAPHVKADEPRETGSKRRLSAMAAVVAIAAGVGAISGALATAGMMRFAAPAQAPVQVADTSALDASVARIDADLAALKANVEHGSKTGLSQFNRTNDRLDKLEKAQAEPLAKIAKLSETLDKLRAAPAQAAAAAPARETTGSIAPTQVATAAAAPAPVAAAPKTEVGRLPTIEGWRLRNAGNGGALIEGRDGLYEVYPGDPIPGVGRVDAIRRQDGRWVVVTSRGLIVGR

SEQ ID NO: 15784 - protein, 165 aa, BradyrhizobiumColbertium
MSIKRIARHLVQHHWRAKQIFPPAVLDRIEQAIKRGEATHSGQVRFVVEGALDGAPLFRNQPARERALDVFAHLRIWDTAHNNGVLIYLLLADRDVEIVADRGIDSKVGAAGWETICRAMEAEFRSGRFERGVIAGIEAVSRELARHFPPHGPHANELPDAPVVM

SEQ ID NO: 15785 - protein, 295 aa, BradyrhizobiumColbertium
MAASCVLALVLLLKLGLAFSASADVAVPQLTGRVVDQTGTLSSADIAALSQKLQDFENRKGTQIAVLIVPTTQPETIEQFSIRVAEAWKIGRKKVDDGAILVVAKNDRRLRIEVGYGLEGALTDVTSRRIIDEDITPKFRSGDFAAGIGAGVDRMMRVIDGEPLPSPSRSANFAHNLEDLAPVFAAALFASIGVGGFFRAVLGRLLGSLVTGGIIAAVTWLILGSAALAMAVGVLGFIIGFVADLFSAIPPGTGRSRGGGWSSGSSGGWSSGSSGSGGFSGGGGSFGGGGASGNW

SEQ ID NO: 15786 - protein, 202 aa, BradyrhizobiumColbertium
MRKILTVLAALASLSLTNCGYNAIQSEDEQIKAAWSEVVNQYQRRADLVPNLVNSVKGFAQQEKDVLLGVTNARAKVGSIQATPEVLNDPAAFQKFQAAQGELSSALSRLLVVTENYPQLKSDALFKDLMSQLEGTENRITVARNRYIKSVQDYNVTIRSFPSNLTAMMFGYKEKPNFSVENEKAISTAPKVDFNPAPAPSK

SEQ ID NO: 15787 - protein, 284 aa, BradyrhizobiumColbertium
MSSFETILVERPDPAIARIVMNRPEARNAQNLQMTYDLNAAFDAAVQDDAVKVIILAGAGPHFSSGHDLRAGGKNEAGTDFPPVGNWGGFAEPNAHGRFAREQEIYLQITRRWRNLAKPTIAEVHGKCIAGGLMLAWACDLIVASDDAQFCDPVVTMGVCGVEWFVHPWELGPRKAKEFLFTADSWSAQEAHQLGMVNQVVPRAELSSRVLELARRIATKPSFALKLTKEAVNRSVDVMGQPAAIDQAFALHQLCHAHNLQEFGMIVDPSGLHPSVRKPPAAAE

SEQ ID NO: 15788 - protein, 382 aa, BradyrhizobiumColbertium
MDLNLSDEQKLLRESAERFVAESYDAAHRRKMANDPLGFSPAVWKQFAELGWLALPLPEEFGGLGGGAVDVGILMEAFGRGLVSEPYVATVVLGAALIDRCGTTEQKQASLPKVADGSLKLALAHSERAARFDLAKVATSANKTAQGWRLAGSKIAVLDGHAADEIIVSALMHDHHGPSGRIGLFAVPATAPGLAISDYARLGGGRACNIELSDVNLPQDALLGDGSDSLPAIEWAVDRAMAALGAEAVGIMQTLLDTTLEYTKIRKQFGRTLSANQVIRHRLADMAMQVDESRSMALRAALKADSPPVERARAASGAKAKIGRCARFVGEQSIQLHGGMGVTEELEVGAYFKRLVAFDTLFGGSAHHYGRHAELSRRAASA

SEQ ID NO: 15789 - protein, 398 aa, BradyrhizobiumColbertium
MDLSFNAEERAFQDEVRNFIAKNLTDEMKRATALTPSVFSDPDVGMAWQRALHKQGWGAPGWPVEHGGPDWTPAQRWIFETECARAGVPNVNVMGVKMVGPVIIGFGSPEQKNFYLPRILSGEDYWCQGYSEPGSGSDLSSLKTRAVRDGDDYIINGTKIWTTHAHHANRMFALVRTSDGPRQQDGISFILIDMKTPGITTRPILTIGGDHEVNQVFFDDVRVPVANRVGEEGKGWTYGKYLLEFERGAGIASAKLREGLRAIADLAESDLTGRAIDSPDIATRISEVEVDIDALEMTELRVLSALQTGQNPGAVSSILKLRNSEIRQAVTRLGADVIGHDALAVEPMRPLYKLNHEPATPEEMLTVMPEYLNGRAYTIFGGTSEIQRDIIAKMMLGI

SEQ ID NO: 15790 - protein, 774 aa, BradyrhizobiumColbertium
MNILPGNLRFGAGQPVKRLEDQRLLTGKGQFIDDKPEDGALWLHVLRSPHAHAKIVSIDTSAAASMPGVTAIYTGADLVKDDIGTIPTLNIFKRPDGKPMTVPPRRLLAHEVVRYAGEAVAAVVASSRVEAQSAAEAIVVEYDVQPAVVDPVEAVKPGAPVVWPEAPDNIVGAMSYGDAAKVDEAFAKAAHTVELDIVSQRLVPSAMEPRSTIAEIDKKTGRLLLHVQSQTPASTRDVLAEAVLKRPKDSVRVLVGDIGGGFGQKTNLYPEDGIVAYAATKLNKKIRWRGDRTDEFVGGTHGRDLTSTASFALDEKGKVLAYRVKSIGCTGAYSSGAANIIPLVLGPFVQTGVYDLPLVHFEVKSVMTHTAPVGAYRGAGRPEAVFIVERLFDAAARKIGMDPRAIRKANYIKPAQLPYTNAAGQVYDSGAFAHMLDRAVKLADWDGFAARKKAAKKKGLLYGRGLTSYIEWTGGRAHTEKVSLHATSQGRVVLHSGTMAMGQGLQTTYTQMISDTLGIPMDKIDVVQGDTDLAMGFGSVGSRSLFVGGTAVAVSSNDLVQKAREKAANVLETSVEDIEYQGGMLTVVGTDRRISLFDLAEKESGAKLSVDSEGEVDGPSWPNGTHICEVEIDPETGVSRVVRYTTVDDVGVAVNPMLVTGQIHGGVAQGIGQALYEGVSYDADGQLLTASYQDYCIPRADDIPPIVVTLDDSAPCRTNPLGAKGCGESGAIGGPPCVTNGVMDALAELGITQLNTPLTPQKVWQAIRDAKAAG

SEQ ID NO: 15791 - protein, 368 aa, BradyrhizobiumColbertium
MNRRYAIAAAVFAALLLAVTSSKILHVPISYVPWAAPTARAVEQRGPLSDGEKATIDIFERVSPSVVQVAVRSAANPLMGEEGQSGAGASGTGFVWDRDGHLVTNNHVVANSNEIAVRFASGEVAEVDLVGRAPNYDLAVLRIRSVRQLPAPIALGSSNDLKVGQSAFAIGNPFGLDQSMTSGIISALKRRLPTHGGREIANVIQTDAAINPGNSGGPLLDSAGRLIGVTTAIISPSGSNAGIGFAVPVDVVNRIVPELIRNGRVPTPGIGIVAAGEDVSTRLGVEGVIVVRTAPGSPAERAGIRGVNFSTGAVGDVITAVEGKPVRRLADLTDALEQAGAGKTVRLTLKRGSDTRDVNVGIIDIERS

SEQ ID NO: 15792 - protein, 291 aa, BradyrhizobiumColbertium
MSDFRGVFPYLVSPLDADGTVRTEVLGRLCDDLVGAGVHGLTPLGSTGEFAYLNAAQRTAIVQTTIEAAQGRVPVIAGVASTSTADAVAQAKAYQTLGADGILAILEAYFPLPDAQVESYFRAIADAVDIPVVIYTNPQFQRSDLTLDVIARLAEHPRIGYIKDASTNTGRLLSIMNRCGDSLRVFSASAHIPAAVMLIGGRGWMAGPACIIPRQSVALYELCKAGRWDEAMALQRGLWRINEAFARFNLAACIKAGLSVQGYDVGDPVPPQVPLTADARKIVEAALRELA

SEQ ID NO: 15793 - protein, 386 aa, BradyrhizobiumColbertium
MPLTMLSRFLHPDPRIRRELVDLLYTSLPQVFAIGVTSVTGAVALAVMSGDTGYAVISIFIFITATARIISLFRYKSRAAQFTDADVIRWERLYGAGASAFGLSLGMLSYRALQLDDAPGAWIAFGLSMSFCVGMVSRAAIRPWIILTTAAVLLTPTILAGLLRPELAYKLGAVMLVFFWLTLREASKHLSAAFVERLEAKHRLARQATHDFLTGLPNRAAFLQALAETQGDFAIIAIDLDGFKPVNDRHGHHAGDDLLRQVAERLSSCVGEGGLAARFGGDEFMMLKPVAAGAGGRDEALALARQAIRDLSMPFLLTDIPVRIGASAGILVSTGTAAAGKTSQLLEQVDRALYTAKRAGGGRWNWSEEETASNVRQAETAALVTS

SEQ ID NO: 15794 - protein, 321 aa, BradyrhizobiumColbertium
MTVDLTRRTLLQLAGATSLAMAAAAAARAEGDRQGGGPTYASRTPMRIGMVTLRVKNLDEVTDYYRDVIGLSVMERSGTAAKLGTAGITLLVLEARPSAAIEPRNAAGLYHTAFLMPTRKDLARWLVAAATHRVPLTGFADHLVSESVYLDDPEGNGIEIYADRDPSLWQWSEGSVKMATDELDIPDLLSLTNTRVPDYAKAPDGLRIGHMHLRVGDLAEAQRFYHGVIGLDPTRSRAGAAFLSSGRYHHHLGLNVWQSQGAGRRDHQATGLAWFSLVMARQELLAAQEERLRQSGAQVTGLADGFEAVDPWGTRVRLLRT

SEQ ID NO: 15795 - protein, 288 aa, BradyrhizobiumColbertium
MTDPTALTSLSSALADIVGRTAPSVVSVHSHRSYATGFAWKPGLIVTADETLADEGEVGIGLADGGRATATIAGRDHTTDIALLRVDAATAPVRLTATVPPLGALSVVVATNRDTPSAALGMVSASGKSWRSLRGGDIDARIELDVRLRESQQGGLALDATGEAYGMVVLGPRRVLVIPTATIERVATQLETRGRIARGYLGLGLQPVRLEDGIGAMVMNVDTAGPSAAAGIRQGDVIVAVNDQKLSGVRALAGTLGPSSVGAVVDVAALRGGEPVGFKVTVGERPEA

SEQ ID NO: 15796 - protein, 123 aa, BradyrhizobiumColbertium
MSEDTSPEIVLSLEIDDPALADRLAALLGNIAGLRLAAPGEQAAAAIVGRDPRIMPEDIALTQRELDVLALMAEGASNKMIARQLGISVHTVKFHVASLLDKLDATGRTDAVTHAARRGVIEL

SEQ ID NO: 15797 - protein, 502 aa, BradyrhizobiumColbertium
MRWAWRTKIQVHLNIDLRMRLWNSAETEAVRVFASNLRDLLLAAPAGTRVTMGLDPGYRTGVKVAVVDATGKVVDTTAIYPHEPQRQWNESLATLGRLALKHRVELIAIGNGTASRETDKLATELVKGLPELKMNKIVVSEAGASVYSASAFASEELPGLDVTLRGAVSIARRLQDPLAELVKIEPKAIGVGQYQHDLGQAKLAKSLDAVVEDCVNAVGVDVNTASAPLLARVSGVGAGLAQSIVAHRDANGPFKSRKALKDVPRLGPKAFEQCAGFLRILGGEDPLDASGVHPEAYPVVRRILAATKSDIKALIGNSEIVRTLKPKDFVDETFGLPTVTDILRELEKPGRDPRPAFKAAVFKEGVEEIKDLKKGMILEGTVTNVAAFGAFVDIGVHQDGLVHISAMSKNYIKDPREVVKPGDIVRVKVLDFEVARKRISLTLRLDDEVGAKKEAPGMQRDNNSRNPARMTSSPPRKQEPAGGGALAEALRRAAEKSGGKRA

SEQ ID NO: 15798 - protein, 262 aa, BradyrhizobiumColbertium
MQIEDFLLLAAEHGEDAMRGQLGQRLGEIEIVGELLAFGLLAVAYLGGHTRVGPHLLAKGADQVGVLVEALDQNGAGAVQRGGRIRNALLGIDEAFGHDLGIVRGFRQQLIGERLEAGLLGDLRLGAALRLERQINIFEAGLAVGGHDRRFEGGIELALLANRFEDGLAAVLKLAQVHQALLQGTQLRVVERTGGFLAVPGDEGNGGTAVEQRHCRLDLFGANPKLLRNFLVDAGHARFPLSKHAAQGEPPAAGRRLWTNRG

SEQ ID NO: 15799 - protein, 91 aa, BradyrhizobiumColbertium
MQRNLFRKGPRESTEPARGAGLRGTEGSQGGRIKGVASISRGIAATEGCLAFDLVRRPRGDRLLFPTASEAKRSRVSSRRDPGLLRRKRWQ

SEQ ID NO: 15800 - protein, 492 aa, BradyrhizobiumColbertium
MDVMTLPMSWNEWAQHDGIALAGRVRKGELTAKELARQAAAGVAKVDPALSGVVELFEDVIADPAKDGANLAGPFAGLPFLMKDLGPTMKGRLQEMGSLLMRGNRASADTFLTGKFRQAGLNLIGRTTTPEFGVCSSADNPAVYVTRNPWNTDYTTCGSSAGSAAMVAAGVVPIAHATDGGGSIRIPAGVNGNIGLKVSRGVFSLAPHMSDLTGLVSIQGCQSRSVRDTAAFLDHARGPAPGEFMPFWNTAQPYSEMIKRDPAKLRIALSHTWGDYTATPEIAAELEKAGRFLEGLGHHVDYALPEIDFRAAFAAQTTCYISNFAVVISNMLAARGLEKPPEDLIEPMNIRIWEAGRHTSFAERAKMQAVFNTTSRGFGTFFEQWDVILTPITALPTPKVGTREYLTISDNPDVLDWFGNLWRNFAFTPLANLCGIPAISMPMASQNHGLPLGIQAIAKQANDGLLLQLAAQIERALDGKWNGGKKPKVHVA

SEQ ID NO: 15801 - protein, 105 aa, BradyrhizobiumColbertium
MADPETPSTAQGPVTISTSSAERAPIIYFDGASCFGHHNGAIQIELAANLLMPVGAAVRVDVVQTAHLRCSVAAALALREALDKALAMYKQGQQQPNEEIPAVKN

SEQ ID NO: 15802 - protein, 302 aa, BradyrhizobiumColbertium
MSTSPTTLPFEELAEAIKGRRSDYGHISGLQLDRFAPAEAWSSLPYRPVFVGDTETGVIHGGVVTAMLDESCGMAVQLALDGTRAIATLDLRIDYQKPATPGLDIKAHSVCYRTTRSIAFVRSTAYQESEDDPVATATACFMIGANRTNMLADRRMDARNIPTLEAPENPDGPFANSPFARALGIRVNDDGTLTMPFSPQIVGNPILPAIHGGMTGAFLETTAIIGVARELGAAAPPKPIGLTINYLRSGRALDTFANVSIVKQGRRIVAFEARAWQDDAEKPIATAFGHFMLRPTPGSDEE

SEQ ID NO: 15803 - protein, 130 aa, BradyrhizobiumColbertium
MRHPLDIVAMFAALWLLASMVLDALTPKELTAITIAVAIGPAIIITAVFYHLRSPRADFAVMFAALWLISDIAIAFASPKALPHFLIALGFLPALLIGAVLHWRTFTSPRRGEVGLRSNPGEGPQPSARP

SEQ ID NO: 15804 - protein, 578 aa, BradyrhizobiumColbertium
MAINNVADLFVATLEQAGVKRIYGIVGDSLNALTEALRRRGTIEWVHVRHEEVAAFAAAGEAEMTGSLAVCAGSCGPGNLHLINGLFDAHRSRVPVLAIAAQIPSAEIGGGYFQETHPQNLFRECSHYCELVSDPSQLPYVLENAIRAAVGLRGVAVVAMPGDVAFRSPPKRALSTTRGLTLAAPKVVPQADELKALADLLNGAGRITLFCGRGCAGAHAPLMQLAEALKSPIVHALGGKEHVEYDNPYDVGMTGFIGFSSGYAAMHACDALVMLGTDFPYKQFFPTDCQVAQIDIRPENLGRRCKIDLGLVGDVKLTIEALLPLLETKTQRKHLDDAIAHYKRAREGLDSLAKGTPGSKPIHPQYLAKVISDHASDDAVFTADVGTPTVWAARYLDMNGRRRLIGSFVHGSMANAMPQAIGAQATQPGRQVISLSGDGGFTMLMGDLITLTQMKLPVKVVVFNNGVLGFVALEMKAAGFVDTNVDLENPDFAAMARAMGIFAKRVEDPGDLPGAVKQMLAHDGPALLDVVTAKQELSMPPTITAEQVKGFSLWVLRAVMNGRGDEVLDLAKTNLLSR

SEQ ID NO: 15805 - protein, 214 aa, BradyrhizobiumColbertium
MSVAFPPMKRPLVAILRGVKPEETEAIVEVLIDAGMTAIEIPLNSPDPFRSIAIAVKRAPAGVLIGAGTVLTVADVDRLHDVGGRLMVSPNVDTGVLAQAHRHGMVTMPGVFSPTEALLAARSGASSLKFFPASVLGAPGIAAIAAVLPPGVMIAAVGGVSDQNFAEYVKGGVTAFGLGSSLYKPGMTAADVAARAKATITAYDRATVKEMKAH

SEQ ID NO: 15806 - protein, 304 aa, BradyrhizobiumColbertium
MIEPAYVAVDWGTSSFRLWLVDRTGDVLAERRSGEGMLAAAKAGFPAVLRSHLAAVEAPDHLPVLVCGMAGARTGWVEAGYVDTPAPLSAVLKQAVRVPSEVRDVRILPGIAQRDAGAPDVMRGEETQLLGALGVDAAGEALVCMPGTHSKWVCVKNGIVERFATFMTGELFSAISRETILSLAVAGADDAEDVASFKAAVKAAYEAPAFAANLLFGARSRQLLFGGAPAAARETMSGTLIGIEVAAGLSGSVPQAGVKLIASGRLAMLYRLAFDTLSVAVQPVDADEAVRHGLSMAAAAIWTK

SEQ ID NO: 15807 - protein, 365 aa, BradyrhizobiumColbertium
MEIGYFTMPSHPPECGLKEGHDWDLQVLRWLDELGYQEAWIGEHHTAPWEPNPTPDLLIAQALLQTKRLRIGPGGFLLPYHHPAELANRVAMLDHLSEGRLNFGVAASGLPSDWAMFNVDGMSGQNRDMTREALEIILKLWTEPAPFTHKGKFWTVTKPDTMFDFLKPHIKPLQAPHPPIGVAGLSKNSDTLKLAGERGFIPMSLNLNPAYVSSHWDSVEIGAAKTGRKPNRQDWRLVREVFVADTDEEAWKLSTGDMMGRMMSEYFLPLLGHFGFKDYLKHAPDVPDSDVTVEYCAKRNWIVGSPSTVAEKIEKIYDEVGGFGVLCVFGFDYKHKPEAWHHSLALLKNEVMPRLKHLGSAKKAA

SEQ ID NO: 15808 - protein, 184 aa, BradyrhizobiumColbertium
MTVDAKDFKQAMRQCAGAVALVTVGAEHGRRTGLTVTSACSLSDNPPSLIVCVNRNASAHARIREEGAFAINFLHEDHALLALTFSGQKGVNGDDRFAFGQWRRGVTGAPVLADAVAAFDCVLAQEFETRTHSIFVGEVRGATHSATATPLVYLRSSFHIPEEIRETVSVGDLDSRHLSWTDFS

SEQ ID NO: 15809 - protein, 476 aa, BradyrhizobiumColbertium
MTPNRRTLLNASVSATAMLASTALAGQSHGPSSGSPAGAELNCSPEACAAASEDFGHIIHKRPRAVFRPTTSAGIAEILRWAGQQGLTVAARGQGHGIYGRSMTEGGIVIDLGALATIHRVEPDRVVVDAGATWHAVLEATLAKGLVPPVLTNYLGLSVGGTLAVGGIGGSSSRHGLQTDQVLELDVVTGEGRQLTCSPTSSAGLYDAVRAGLAQCAIIARATLRLVRAPERVRRFQLSYPDLPSLTADQRRVLDAARFDQLQGAVVPDGAGGWRYLLEAGVFHDGQSPVDDEALLAGLSDRRESAVITDLTFRDDANAFAKLETLLRSNGQWFNPHPWLLTFLPGSNAMEIASEVIAGINSEDIGPFGRITYYPMVTDECRTPLVRLPGERIVFPFNLIRIPASADKANAERLIARNRELYDRIRGAGGVLYPVSAFPMSSRDWADHFGAQWPLLREAKAQHDRGSHLTPGYKLF

SEQ ID NO: 15810 - protein, 51 aa, BradyrhizobiumColbertium
MFPRIGHAAPARRFVRILPVCGNVYPATRRLFAGSGDRSLRATGTYPPGSA

SEQ ID NO: 15811 - protein, 295 aa, BradyrhizobiumColbertium
MEEIEVFLAVVEAGSQTAAARRLGRSLQSVNRALAALERGIGVELVRRTTRQSLATEAGLAFYRRVKPAFAEISEARLEAANRRVEPSGLLRLAAPVLFGSTHVVPAIADFMARFPRIETDLNVTDRPVDVVGDGFDLAVRIRELPDSSLKARRLGELRTVVYGAPAYFARHGRPRHPDDLADHQCILRKTGPGDTEVWRFQIGGKAKLLQVYGRFRTDNTNAAQAAACHGVGIGYAPFWQIRDRVDQGALEIVLADFEAPRMPVYAVVPPSSAPPAKTRLFLDLLAERLKRERL

SEQ ID NO: 15812 - protein, 623 aa, BradyrhizobiumColbertium
MASLSASNHVARVMSVANHVADVDASSRIANSWRRCLISHKLDPARQGPPQTLTEAEIRHVVAPMEETIRLVTPELDDLARVLRDAGYCVNLADTNAIMLFSRLPGEADARMFLDWKIYTGSNFAETFEGTNGLGTALADQKPILVHRDEHFRAQWHMFSCAVAPLFDHAGRLAGAVNITSCRADLERTAHQLALAVTLEATRRMEGAIFRGHFRDAWIATVPGDGGSGLLAYNDDRRIVGACRSARALLGLTDGMIASGIDLSRYVRFDQHAARGSEEIVELRRADGAALGRGHVAPPLRARSSARPLAPRRDVPVDRFNALHRLAGRDPGLIKSVKRLGSVSDHDLPVLLQGETGVGKDLFARAIHAASKRALNNYVALNCAAMPESLIDAELFGYEAGAFTGARRDGSKGLIVQADGGTLFLDEIGDMPIALQTRLLRVLENREVWPLGALKPVAVDIRLISASHRDLGRMAEQGAFRADLYFRLRGMEVRLPALRERTDRDDIIRQIAREEAPNCRLSDEAWSQLAAYPFPGNMRQLRHVLRLAGCTAENGVITDADLDLPPFGGRAAEPDLGAAERATIVEALRRHGGRVTEAARALKLSRATLYRKIKQLKIDPGSY

SEQ ID NO: 15813 - protein, 1101 aa, BradyrhizobiumColbertium
MPFKKLLIANRGEIAIRIARAAADAGIATVAIHPADDALSLHVRVADEAIEIPGRGARAYLDIDAVVKAAKAMGCDAVHPGYGFLSENATFAKACSDANITFVGPQATALELFGDKVAARQLAKRCGVPIIAGTTGPSSLEEITAFFASLGSNAAIVIKAMAGGGGRGMRVVENASDLSEAYARCQSEARAAFGFDGVYAERLIRQARHIEVQIIGDRHGAISHLWERECTIQRRHQKLIEVAPSPSLSDALRGRIIEAAKQLAAAASYDNLGTFEFLVDGGAEDSFAFIEANPRLQVEHTVTEEVLGVDLVRAQLAVAGGSPLAALGLAQESIPKPRGYAMQLRVNMETLDETGATHPTGGVLAVFEPPSGPGVRVDSFGYAGYKTSAAFDSLLAKVIVHTPGESWHDVVAKASRALREFRIDGVVTNIAFLQAVLAHSDFRINRIATDFIDRNIGKLVEAADGAAKPLYFAAAERGGVQGAEALVAQTVPEGAVMVAAPLQGTIVTIQVKEGEIVRPGQQLAVIESMKMEHLVMTEQGGRVMKLVAGDGVTLMHGEPILYLEPLDVAADSTAAEAEIDLDHIRPDLAELIARQANTLDENRPAALERRRNTNQRTARENVAQLVDDGSFMEYGSLAIAAQRRRRKLDDLIKNTPADGLVMGVATVNAEQFGPEGARCIVVAYDYTVLAGTQGHMNHKKIDRMLTLAEDWRVPLVFYAEGGGGRPGDTDRLGMTGLDGPSFVQFARLSGLVPVVGVVSGYCFAGNAAMLGCCDVIIATKNASIGMGGPAMIEGGGLGVYHPAEVGPVTFQAPNGVIDILVEDEEEATRVAQKYLSYFQGAVTEWETADQRLLRRAIPENRLRVYDIRSVINLIADKDSVLELRRDYGVGMITALIRIEGKPFGLIANNPRHLGGAIDADAGDKAARFLQLCDAFDLPIVSLCDTPGFMVGPEAEKTAIVRHVSRMFVTGASLTVPLFGIVLRKGYGLGAQSMIGGGFHASFFTAAWPTGEFGGMGLEGYVRLGFRKEMEAIADPEERETYYRNKVAELYANGKAVSIASVFEIDNVIDPAETRRWIMAGLRSVPKPPARTAKKRPCIDTW

SEQ ID NO: 15814 - protein, 573 aa, BradyrhizobiumColbertium
MSVSLNEQDYLATLHELWNKAWPKGTPRSPNYLHGEVPLTEYLRAWAKRSPERPAVIFYGHVTTYADLDRQSDRFAALLQAKGISKGDRVAVFLPNCPQFHIVFFGILKLGAVHVPVSPLSRAFELSYELNDTQAEVIVALDQLMPVVEQVRDEVRLREIIVTSFADVVPAKPAIPAPDSIRVPRAAVTGATDLLPALAAMPIPVPLPPAGLDDVAALNYTGGTTGMPKGCVHTHRDMVYTAAANYGISVLSDESSVFLSFFPEFWIAGENFGLIFPLFSGATLVLLARWDAVGAMAAIDKYKVTITAMPVDGAVELMDHPRWNEFDLSSLQQVRVVSFVKKLNADYRKRWKDLTGTILMEAAWGMTETHTSNTFTAGFQDDDFDLNNQPIFVGLPVPGAEFKITDFETGALLPLGAEGEIRVRTPSLLKSYWNKPEATAESLIDGWLRTGDIGAIDKDGFLHFLGRRKEMLKVKGMSVFPPEIEALLGQHPKVLGSGVVGREDPERGQVPVAFIQLKPEAVGSVSAEDLRAWCAERMAVYKVPEIRIIEALPLTATGKVKKQDLNPILPAAV

SEQ ID NO: 15815 - protein, 218 aa, BradyrhizobiumColbertium
MAGRRILLINPNSLEATTTMMVAIAKSAAADGFDIAGVTAARAPTMIVSADALEAAAPEVEEIARARSGDCDGIIVAAFGDPGLARIKLTMRLPAVGIGESSMLEAAENGRRFGVATTTPLLKAKIDALPDVLGLRSHYTGTRFTVGDPHELMRDPSLLRTALAGAVEACIAQDGAEAVIVGGGPLGEAARELEAIFTVPVIAPVPSAVRRIIRLVAV

SEQ ID NO: 15816 - protein, 256 aa, BradyrhizobiumColbertium
MKRTRPFKRKPKRSEPKHREPEVVDPRNIDDDPVVQGILTAISQKRLKPGAKLGEDKLAAAFGTTRIHIRQALSHLASRKAVMQIPNRGAFVYRPSWEEAQDIFAARRIIETAAVSAAVDRLDKAGKAELKAHMEREARHDRNDRWASLSLTAEFHILVAKLAGNRVLLEISRELMLRTSLAIATFEQPGEPDCSPDAHPDIGALILARNKAGAIHAMHHHIEEMEQRIRPKKGEDEVDELTAIFQEIGARARAGG

SEQ ID NO: 15817 - protein, 373 aa, BradyrhizobiumColbertium
MELALSDVRGLSLDLKGIGHAFGATVALDEIDLSVAAGELIALLGPSGCGKTTMLQIIAGFLRPSRGEVRFDGARVEHVPANRRRIGMVFQNYALFPHLTVFENVAYGLRARKTAKNVVAAKVEQMLGLAQMAPFARRLPGELSGGQQQRVALARALAIDPGLVLLDEPFSALDKNLRLDMQIEIKSLLKTFGVTSIIVTHDQEEALSMADRIVVLNKGRIEQIDSPDALYDRPASLFISNFIGHTNLLRGTVTDADRVQLDAGPELDLGRSAQRRRGTPVTISVRPENILFGAERPGAIPVTIRATLPLGAVSVTEGVTASGEAVKVSQARAAGSAKTQAGETAWLTISDVSRVSIFSTPVDELSLHHPRSI

SEQ ID NO: 15818 - protein, 349 aa, BradyrhizobiumColbertium
MSLSRRSLLTSGSAALAAAGLGWRTSSRAAPSIVATTYPGSFDEAFRSVVGPAFKKSSDGSVTFTPLLGVDQIGKIQASRNTPPFDVVLFDEGPLIPAIASGVLEKFPVDHSKSYADIPSVFRHPDGYAPVITVQLIGIAYNPKKITKPPTSWEDLWKPEHKGRVGITGLGSSLGTAFMVEIAKLNGGSETNIEPAFEAIKKLLPNVGAIAASPGALAALFQQGEIDIAFNFWNNVALLAAKGVDIAFAKPKSGAVVIRTSAQIVRNNQDPKAVLDYLDTVMSAETQKGLEAAPWMMMPTNSKVKLTGANLTVAKSLDDLVSNNVLLDWTKFQPLRGEWITRFNKEVRI

SEQ ID NO: 15819 - protein, 274 aa, BradyrhizobiumColbertium
MLPAVPLAALFLAAFVLPLIALVAISLFRTSQFEELSLAQYVRFFSDPFSIKVLTDTIWLGAEVALVTLIIAYPIALVYVASGQLMRTLITFLIMLPLLTSTVVRTFAWIVLLGRDGIINTAMLSLGLWQAPARLLYTWEGMVLALIQIQLPLMALPVINSLLRLDGNLTRAAEGLGASRARIFVTVILPLTLPGAIAGWLLVFAAAATAFITQTLVGGGRIILMASHIYQQAVGVQDWPFSAALSLIFTLAVTGIVFATGALSRRYVRGVDAA

SEQ ID NO: 15820 - protein, 269 aa, BradyrhizobiumColbertium
MQRSLIDRVYSGIIGAITGFGLLLLLAPTLVVLIISFTGGVTLKFPPPSWSLRWYVDLLQSQEIVEPALTSLKVATAATILSAVLGGAAALGLARSRLKIARVLDALFMSPMVLPAMAFGLSLLLVFNLLGIRLSAATLVLGHTIICVPFVIRMVGASVQQLDPVLITCSLSLGAGRWYTFRRVTLPLIRRGIVASCFVAFLTSFDNVPVSLFLADARTEVLPIKLWAILEGSLDVRVAAVSGVIVLLTLAGLVCAEIFGGFSRQIGSR

SEQ ID NO: 15821 - protein, 299 aa, BradyrhizobiumColbertium
MPIERDLRGYGRTRPDIVWPNGARVAVSLVVNFEEGAELAIEQGDAETEHYGEVASTAPPGVRDFVQEQVFDYGMRAGLWRFLDAFNEAKIRSTFMMCGRAVERVPDLARAVVEAGHEPAVHGWRWLPHALYGRPETERRDIERTRDAIAGATGLTPVGFMSRGSQSAWTRDILIGLGFAYDSNALDDDLPYWSPSSQGAMLVLPYGFDTNDMKFFHPNGFVQPEDFSNYVSAALTTLVEEAERGRSAMLSVGFHLRICGRPARFRAVKTILAELARLEGRVWVATRADIAAHFRKVTR

SEQ ID NO: 15822 - protein, 86 aa, BradyrhizobiumColbertium
MIIHLLDISGGRNGASAAGLRPEAPNEEPLRCAQRRKIDGSGMCRMMHEPLAFGCSRTMAGADDPRRSFCQRPLQVNARRGVVEMF

SEQ ID NO: 15823 - protein, 122 aa, BradyrhizobiumColbertium
MYDHFRVGDAVPSLDSIIEIFACTAHTAIEVHCPTCPRMSDSERGILRAIAAAQQDRVDIAREQFERWLPPVGADWALAPVEGLATIFRRAGLILPDRHVRSVGHDRIMAMKSWLVGTPTLH

SEQ ID NO: 15824 - protein, 155 aa, BradyrhizobiumColbertium
MQDARDCVAVADAGQSQLCPLRAALAAPPCVESYDEFCRVALSLFRFIGAAYATGASDCWEAAYRFADEAPGIADSPLLVARAALVRILRGGRPCELCFMPPSCRRLSKDEAELMRLLAVARRKQPGELESMICQFVGSDKEDAATRAVNALALC

SEQ ID NO: 15825 - protein, 308 aa, BradyrhizobiumColbertium
MPVPILLVTGFLGAGKTTVVNHLLAHAEGRRIAAVVNDFGAINIDAELLAGASDGVVSLANGCICCSLEGDLLRTLSALLRRDPKPEYIVIETSGVADPADIVRNLMDPVILREAPLETVVCVLDATAPPAAFEDALQRSQLRVADIVALSKLDLADEGAGVRIRDALRALRLPALVVDANRGEIPAALLFPANLDRAPARDPGPRRPTEERFETLSWTSDKPVSLPRLQQAINRLAPKLARAKGLIESIEQPGRPMVLQFAAGRATLAPGVASAPGVPRTRIVFIAELGVLSKAELDEIMEACAAAV

SEQ ID NO: 15826 - protein, 496 aa, BradyrhizobiumColbertium
MSGLVISGGRVVDPASGMDAIGDVAVVDGRIAAVGTGLGGAERVIDATGLVVAPGFIDLHAHGQSIPADRMQAFDGITTTLDLEAGVLPVGSWYESQARKGRVLNYGAATNWAFARIGAMTGSNAESSLEAFGNAMRDRRWIDNVATDAEVSGILERLARGLNEGGIGIGILNAYAPGAGVQELTAVCQLAAAQNVPTFTHVAFMSRIDPESAVEAYIRLIGYAGATGAHMHICHFNSSSKTDVERCRVLIAKAQAQGLPITVEAYPYGTGSTVLAAAFFSDPEFVERNGTGYDSVQRVTDGYRFHDREELLKAQAEEPSSLVLWHILDTENNAHHRDLLDMSVLYPGGAIASDAMPWTLSDGTTYTGDAWPLPDDATSHPRSAGCFTKFIREWVRERKTLSLLEGVRKCALIPAEILSQSTPAMRAKGRLAKNADADIVVFDYEKLSDRATFTAMNRPSEGVRHLVVSGQPLISDGVLDVNARPGKPVRRPVIGS

SEQ ID NO: 15827 - protein, 402 aa, BradyrhizobiumColbertium
MALLPRFFLLVLLHVITIWPAAAQDGEPVRLSAAIQYQFIARWDVDRLNRILQADTPAFAGITVTYSPARNPVRLYRVTYSSVVPERGNKPTVASGLIAIPEGQATSFPLLSYEHGTVYGKQQVPSFPDQSPETQLMIAQFAGQGYVVIGADYFGMGTSAETEGYMVKGSHQQATYDMLVASRAVLDHLKLATTKLFLAGWSQGGFVTMAMLEKLEQAGIKVDAAATASAPVDVFVALNGFLNFPRKNDASWVNSLFILSAFSFENYYGVPGLARSLIADAYYDVARKAYLREPYDAAAVPTDLHKLLRPDYFDPQFFAASAYGRLVAQTQAYRWIIKSPVRNYYGETDEAISVGLGRLAMTYQQAIGNGNPAVEAVSTGPTTHRGTFATAVPKWKAWFDGL

SEQ ID NO: 15828 - protein, 734 aa, BradyrhizobiumColbertium
MVSTDGWAQSAGPAQTLDPVVVAPSAKPPNVRSTRRSEAARLARSRQQRNLAAAETRAPTASPAGSAFAAPTLNLTGASTAGSRLGLTRLQTPASVEVISAETLSERGQQNVLDAVTQNATGFTASPAPGNGGVSFNTRGFTGLGSVMTLYDGTQLYIGAGTVTFPFDTWSTERIEVLRGPASVMYGAGAVGGAINIVSKLPLWVPRNEAEVSLDSNMTRRIAVDSGGPVSKNVAYRITAIGNMSDGWVDRDNTSNVALHAAVQVRQNEDVTWTLSTDYGDRHPSRYFGTPLINGKLEEALRFKNYNVSDSHIRYQDSWNQVKTDWQAADGISIQNTLYYLNSKRHWKDVESYAYNPATGLIDRASYIEIFHDQQQVGNRMDTKFRGHVLGMANEFLAGFDVNSINFTHTNNSPYGGASSVNPYVFSPGSFSSPNATIPGYGSVTNQYALFAENRLSVTEQFSLIAGVRQDQPTITRTDYVVPANSFEKSFSSTTWRAGAVYTPVKDLAFYGQYATAVDPVGGIISLSSANKNFDLATGRQIEIGVKQSFWGGRGEWTLAGYEIVKNNLLARDPNIPSLTVQVGRQSSRGVEASVGFLLDYGWRIDANTAFLRAKYDDFVQSVGGVAVNYAGNVPVNIPQNVSNIWATWAFAPNWSANAGVQIVGKTYADNANTVTRPAYNIVNAGVQWKPDLHTTVSFRIYNLFDEVYTTSGGTTQWLLSMPRTAQLGVNVKF

SEQ ID NO: 15829 - protein, 481 aa, BradyrhizobiumColbertium
MARPLKRTLRRWLYIVHRWIGITTCLFFAMWFISGVVMMYVAFPGLSDKERLAALPDIQWEKLALSPDDVMKTAGATRYPRDLRLSMLADEPVYRITGWDGRRQTISAADGRVIAGVSEQQALAVAQHHPASRSPQLEAIIDRDQWSVTARYDPLRPLYLIGLGDNAGTRLYVSSRSGEIALDTNQTERVWNWLGSIPHWIYPTVLRKDGPLWRLVVLWISGICLIVGASGIWIGILRVRLKRRYASGRITPYRGWMAWHHVTGLIAGIFVLTWTFSGWLSLNPGEYFASRSTTREVLQRYAGHEAPTIATKLPAPQSGAVEARFIWLDGSPMIVVASRDGTQRPLDVTSGRTTAIPQHRLWTAAEKLLPQARVAERMVLEEYDSYWYAHHHDRELPVLRAVFDDDAKTWFHISPVTGDILGHVDGSRRTYRWLFNALHSFDFCLLLMHRPAWDIVVWLLSILGVIVSVSGVVVGWRYLRR

SEQ ID NO: 15830 - protein, 341 aa, BradyrhizobiumColbertium
MIVRHFLQRDSNHPVSRRAFLGGFLSAGSALALGGCAGLGATGARFDASSLSVEPTLLVTTTRKPVNGGRTKTWFGPERATSMTVAQVKLSAPDESRLSLASVGLGTWRLDRVEPVPADVGDLAAQAGGGDVLIYVHGFKQTFETAVLDAAQLSDGIRFRGRTMAFSWPSRAGLFDYAYDRDSAMWSRDAFERVLSSLVSSPGGGRVHIVAHSMGTMLTLESLRQLYGRYGDTVTSKIGAVVFAAPDIDMDVFSSAVQRIGPLAGKITVIASTNDRALALSGQLAGGMTRVGAAEKAVIARLGVRVVDASQEGWGIINHDLFLSNSEVQKVIRRSIDGTMA

SEQ ID NO: 15831 - protein, 61 aa, BradyrhizobiumColbertium
MHNPKGLEFPCVAIAGLGLLGRHGKTIEECVRLTYAGVTRATHEALLTYSSESALVQRLIA

SEQ ID NO: 15832 - protein, 53 aa, BradyrhizobiumColbertium
MGAAWQKTAKDTERDYLSVKLDDPSFPAPIYATLTEVEGAEGLQLIWSRPNRD

SEQ ID NO: 15833 - protein, 58 aa, BradyrhizobiumColbertium
MTVDVIEELRAELRDCLFSPAERKALEAQLAELIRQRTQPTTFGDASPADQRFCTAGA

SEQ ID NO: 15834 - protein, 85 aa, BradyrhizobiumColbertium
MPQLPPDPVHLRRVDAARNMRRFYLLSLQPTLFGGVAVVRNWGRIGTSGQTMMQTFDDSARADEAFDWLERTKRRRGYAPAVQNR

SEQ ID NO: 15835 - protein, 46 aa, BradyrhizobiumColbertium
MPENGPEWELNLAGPTRQMADARRRRRYNSPHRGIARAPAIDLSGK

SEQ ID NO: 15836 - protein, 137 aa, BradyrhizobiumColbertium
MPSRIPLDPKLPKAFDATPNEARSKAQLDQWWDRPYGLTRPDGRIEVRCLNGGAWDRSTHLGIADDYDAACALAEAKQAEWLRFREHPRTCLDEGRVTVIRQPQRPDEEMLELASFATAEAATEYLRANFPEPSSSR

SEQ ID NO: 15837 - protein, 53 aa, BradyrhizobiumColbertium
MPHEAAHANRRTDHLHGRQAAAAMRPLFSPTHACMSARQNQMARFYRKQGSGT

SEQ ID NO: 15838 - protein, 57 aa, BradyrhizobiumColbertium
MAAAVRRANGSKAASWISFSAINDPETAAYIDARGDATLEVDRLTQSSQMSGSSRTR

SEQ ID NO: 15839 - protein, 268 aa, BradyrhizobiumColbertium
MDETGADGCTKVDPVNTIVINNQKGGVGKTTLAVHLAWFMAEAGRRVLMIDVDAQGNATDTLKQHRGSISAADLFKPATRFVAGENNGITLAPADSSLTDIDRGNAAAVLTLQQNLADAAARFDVCVIDTPPSLGLRSVACLVAASHVLAPIYLEDYSVKGVKALMQTVIGVQRRYGRQDTRFLGLLPSNFNTKSPRQRTHLEQLLREAGKYVFPGQIVARDGYAEAVAERVPVWSLKRRSAQEAGREIRAVLAKIVERLDQETTNDA

SEQ ID NO: 15840 - protein, 327 aa, BradyrhizobiumColbertium
MTLDFSFKELVDVAANPSAAAGRPLLVAIDCIDEDPDQPRHTFSEQELEELSQSVAEHGVLQPVVLRRCSEDGRYVIAMGARRYRAARRAGLREIPAFVQDVASPDRYAQMIENIQRDDLRAPEIARFIADRLNAGDTQAEISRKLGKPRDWVSRYASVQAMPDFLRARLEGSSIRALYELYQAWRTHPDEIERRCATQDSFTDAQARQLARGVRGEGGRANPRIEFPVGRPRSENSDPLPEAVLPRNAVKDREAATEDQPKTRVVSQSRSAASLAIRVRYQNRLGQLVVDRLATQGSRHAVVLVDGADHEQEVPASALTIEEILSR

SEQ ID NO: 15841 - protein, 175 aa, BradyrhizobiumColbertium
MERMALISLRVSDEVAAQFSAFAATQGGKSALLRRLIADALAAPEPRIFALPVGRPEKVTVRFRESEMRQLAEVSHQRGMTRTGWIAALVRSRLGSPVQHSPDEHSALRAVVRELNQIGGNINQIARAANISVLQGRAVEPDLSAIQEAKWVIERELAQLRNALNGNADYWDGRR

SEQ ID NO: 15842 - protein, 358 aa, BradyrhizobiumColbertium
MSRRAAPRPADLTSELPPISYVWETPNRRPRRAEWDIPDPAGPSRLTPAMRAKLERIVRRAPEVMVKITGRTKGVAHLKSHLSYITRNGELDAETEQGATLADRSGLKDLQQRWEDDAGLDDKRRRDGSLSVNIILSMPAGTDAVAVKDSARAFATETFGYNHDYVFVQHLDDKHPHVHLTVRSLGHDGKRLNPRKADLQAWRERFAGELRLRGIAAEATPRRTRGRVRKADRGAVLALRKRKITPDVDRLARKEVISEVRGGSTAKHPWDEQTKSRQDAIRRRYLDYAAELQRSGVAADHELARQVRQFVNDMPAVETRRHALKNELSELASSRRRGAEQAGHVDRRDYKRDGERTR

SEQ ID NO: 15843 - protein, 99 aa, BradyrhizobiumColbertium
MSRRHQFSKPHGFSLMRVFRRRHAGKRSSALQPHLTTKLAAESKSYAEAWGRIDGSLKTLGMDHIDLMLIHSPQPCTEFSDGGHFDGCNLDVSPPAAHR

SEQ ID NO: 15844 - protein, 303 aa, BradyrhizobiumColbertium
MPFSDQYRRQVTLLIRVVPLVAQEDCFALKGGTAINLFVRDLPRLSVDIDLTYLPVQPRDQSLKEIEAALRRIAGRIKAQIAGCQVTEGSAERRVNKLFVQLGAATVKIEVTPVLRGCVYSAKTQSVTATVEDEFGFAEIQVVSHADLYAGKLVAALDRQHPRDFFDVRALLANEGITDDLRKAFVVYMLSHHRPMAEVLDPPRRDMKDDYEHGFVGMTEVPVPLAELEETREVMIKAIVGDMPDAHRKFLVSFEQGMPEWDLLGLPGVPNLPAVKWRQLNLDKLSKEKREALVAALEKALGV

SEQ ID NO: 15845 - protein, 244 aa, BradyrhizobiumColbertium
MVSKYVAAGYLERPAGRVYRKPRGALSWEQAVISLQTLLYRTPLAVGGRTALALQGYEHYLPRVTQQVHLYGPSAPPGWLSKLPLSVHFVFHNSTRFFSPEASLPPQGDLNRANVAAEKEAAEKGFVIQSWGQWRWPLVISSPERALLEVLDELPDHESFEAVDKLVESLSTLSPRRMQTLLKACQSVKAKRLFFFFADRHSHAWKNKINKDHVDLGSGKRMLVKGGVFDRTYQITVPKGLDAV

SEQ ID NO: 15846 - protein, 160 aa, BradyrhizobiumColbertium
MLYTPTEVRELTPVREAVEKQATLDLRDMFLCHAWDDRQGAAKQLHDLLEARGVKVWFSEKDVGLGVPLMRAIDKGLANSRIGIVLVTPALLQRLPKESIADKELSVLLAGARIVPVVHQTTYEALRNISPMLASRTGLDTAEESMADVATKLAELVALP

SEQ ID NO: 15847 - protein, 69 aa, BradyrhizobiumColbertium
MTKHCNSGLDDRCRDQDGEIRQKRGDTLVGTLRKTYGPDFAPSVRSDMRLDMLRERMGGASLSQIVKGK

SEQ ID NO: 15848 - protein, 108 aa, BradyrhizobiumColbertium
MALASKIKELRLKKKKSLQDVADEVGASKAHIWDLETGKSSNPSIELLTRLAKCFDVSVADLIGENPTGEGADPQVVAMYRELNELSPADRQAIQAMMDHLKSRKPKG

SEQ ID NO: 15849 - protein, 290 aa, BradyrhizobiumColbertium
MDLADTGSPMGLVTKILSVEKGLPIPVPIEELAKQLDIEKIAPLETEGFEGGLVTDDARSTGFILVNRAAPSGRRRFTIGHELGHFLIVSHKPVEPGKFLCSRADMAKWSADQGDRYARMEAEANEFSGLLLIPPPSLRKFIPKGDPTLAHIPLVAKHFDVSKEAAARAYARYHPEQLAIVVIKDGIVRRAHKGPTFPWISAAYGKPVPRASSFYAKDVRQRVASELSSIIPELWVDLKQGQRAELFEQVYPQQDGYALLMLWLEIEEAEEADDDRTSTQRFRDQQARWR

SEQ ID NO: 15850 - protein, 342 aa, BradyrhizobiumColbertium
MAGFEDTRLFPYYLNSRRLGLLADVNFAVEAQNPLVENSGERVLAMRDVTATAQELLRHGRFPNLTEVVAMKDVEGKRVLGFVWGVFSFSGAAEASRRAQKGKLPKNATLRGNIPLATTEYEMFGEMSNEHFFSDTSVGVLKGKKRMLVAGHFEFNGQKAEVFPYIIGEEIEGAVLPMPIATSIRIYPQQIDQFSRVEQRPQPTAADLRAIESMPEAAVKQAFADIIGEPYVSKDWGGEKSDLQTARLTIDDKPTSAAFIFKGPSVPGPLHPGNMGKRGDQLIRAFEEPVDLIVVQHCNKIENTVVRVTESLAYDPRRPRRYCIIDGAETAQILSAYGKLNG

SEQ ID NO: 15851 - protein, 322 aa, BradyrhizobiumColbertium
MSKRALLVGINEYDNVTPLGACVADVQAMDELISFHADQSRNFDTRLLTSPGKQRVTRATLRTAWDDLFAGFNGDVLFYFSGHGATTSTGAYLVTQEGSEGDPGLAMDDLVNLANKSKASTVLLIIDCCFSGSTGNINPFQNGGMEKVLLREGVTVLAASRSDEPSMEVNGHGVFTNLVLGALRGGAADVRGRVSAASIYAYAEAALGAWDQRPLYKSHAAHLEPVRLCEPKVDHRTLRELARYFSGPEHEYQLDPTFEETNVGAAKPENVAIFKKLKQYQIAGLVRPKVGTDLYWSAERSGFVLLTDLGKFYLQLVQRGRL

SEQ ID NO: 15852 - protein, 128 aa, BradyrhizobiumColbertium
MATKNRIFIAFAVEDKWARDYLVGQAKNEKSPFEFVDMSVKEPWDEQWKTKCRSRIKGCDGTIALVSKNTKNAAGQLWEIKTSKEEKVAVRGIYTTSDERPTSLPAELSGVSVVGWSWANIKAFLDKL

SEQ ID NO: 15853 - protein, 179 aa, BradyrhizobiumColbertium
MTRLFSHALLRELDVGSELWAVSRGLARLVADYKANLQAADEPRRGDLDGRGNLTMAGLIDFCKFFLTTCVDQVDFMAGLLEPEELLRRMEIWTEEETRAKRLPKGSWPLLREAVMAGEYARGHAPALTGYEERQARTVLNALIEKGYLVSPTTRSPVKLGFPTALVDRWFPRLYQPAV

SEQ ID NO: 15854 - protein, 108 aa, BradyrhizobiumColbertium
MNMIGQKSLLVAFALALALSYSAAASAQHAPDAHAQQNAPAQQTMPAQQGQGMGHDAMDHGKMGAKGMEGEHGRMGSGMKQGGASDTTATKGANPPANSNAAPPSGFK

SEQ ID NO: 15855 - protein, 47 aa, BradyrhizobiumColbertium
MIGEINFGWSDRLFTFVNCLLQDADDIGKTMQPSSNESPHIANSMSI

SEQ ID NO: 15856 - protein, 217 aa, BradyrhizobiumColbertium
MSDEVMSQYRDFVQYWPYAVLMILLVSWALYHFVAPADRREWVGAGLLQAFIIALYGEMYGFPLTIYLLTGFFGLDIPLAHVSGHLWATLLGYGSVGALVEMALGVSVMLVGALLIVKGWVKIYFAAGRLVTDGVYGLMRHPQYTGIFLVILGQLIHWPTIVTLLLSPAILAVYVRLAHREEEQLVERLGNAYRQYRQSVPMFVPRGVALKSMFTAG

SEQ ID NO: 15857 - protein, 160 aa, BradyrhizobiumColbertium
MEPMTIGQAAQRSGVPPKTIRYYESVGLVGPAARGENKYRAYSDKEVEVLRFINRARGLGFSLSEIEQLLALYRDRNRPSREVKRLALLHIDDLDRKIVELETIKQALQHLAEKCRGDDRPDCPILDDLGSGTSAPVTASARDRLLSSHSATIRRPGKRP

SEQ ID NO: 15858 - protein, 629 aa, BradyrhizobiumColbertium
MLPGWLQLLLATPVQFVIGWRFYVGAWKALRARTGNMDLLVSLGTSAAYFDSLYLMLAGPAGTHLYFEAAAAVIALIMVGRWLEARAKRSTTAAIQALMSLRPERARIEREGGDIEMPVADVAVGDVIIVRPGERIPVDAVVLSGRSEVDESLLAGESLPVAKQTDDKITGGSINGSGLLRAETKAVGEQSMLSRIIALVEHAQAKKPPIQRLVDRVSAVFVPIVLAVALTSFLGWWLIAGDVTAGVVAAVSVMVIACPCSLGLATPTALMVGTGAAARAGILIRDAEALERAYRLETIILDKTGTVTEGRPAVTEMVACDGDEDQLLGLAAAAQTGSEHPLAKAVLTKAKDRELPKLIDFQSHAGLGLTANVDGRVIVIGNRRLMANHHVSLEPLATRAVELEERGRTVMWVAELAPAVRLRGIIAVADPVKPTAREAVRHLREIGVDTLLLTGDNERTAAAVAAQLGIDRVLAGVLPSEKAAEVQRQQAQGKRVGMAGDGVNDAPALAAADVGIAMGTGADVAMETAGITLMRGDPLLIGDAIAVSRATYNKIRQGLFWAFIYNVIGLPLAAFGLLSPVVAGAAMALSSVSVVTDALLLRRWRPAATGRHAMRSDQSLAPAPQIGGS

SEQ ID NO: 15859 - protein, 91 aa, BradyrhizobiumColbertium
MGKPMSIAEAAAADRTHVTLPIEGMSCATCVGRVEKALSALPGVQATVNISTERADIEFDRRQLTPVALAQAVEQAGYEFPARRANSPFPG

SEQ ID NO: 15860 - protein, 277 aa, BradyrhizobiumColbertium
MPPLDTVMITGSSGFIGSALVNKLAGRFRLVGFDKIASRTPPPAAECVCIDLTNKDAIEAAFERVRIAYGDRICSVIHLAAYYDLSGEHSPLYEQITVRGTERLLEQLKNFQVEQFVFSSTMLVHAPTDPGQRISEESPIDPRWPYPQSKVETEALIREQHGNIPVVLLRLAGVYDDRCHSAFLSQQIARIYERQWLSHLFPGDIRRGQASVHLDDVTDALAALIAKRGELPKESTLLVGEPETLSYDEVQRLVGRLLRWRHPDVGAPLPLGRNDDG

SEQ ID NO: 15861 - protein, 91 aa, BradyrhizobiumColbertium
MGNGWLECLVSIPIIAVVPFAIVMWAVRMAAPTNLTRTGALAGLVAGSISAVAYALHCTDDSFPFVALWYGRTIILCTLAGGALGPRILRW

SEQ ID NO: 15862 - protein, 43 aa, BradyrhizobiumColbertium
MGATAYALHGTGDQFPYIALWYSGTLALCALAGAVLGPKMLRW

SEQ ID NO: 15863 - protein, 76 aa, BradyrhizobiumColbertium
MFSIADLFEAVPMPEIFEEEEWIILTIGLWIAICPWILGFHGDVSASNVHFAIGLIIAGLAAVELWSLRHTPHSKV

SEQ ID NO: 15864 - protein, 626 aa, BradyrhizobiumColbertium
MLVALVFCGAARATTSDVETTWRLLDYIAVDYAGAVSHGSVSSPSEYAEQNEFAATIAAKVRALPPKPERQALATEAARLQRAIADKADAEQVAGIARGLAAALLAAYPVPLAPNKVPDFTRGATLFGQNCAACHGEAGDGHGPDAVKLDTPPIAFTDAERARQRSVFALYQVITQGLDGAAMPSFEGLPTDDRWALAFYAGHFAFPDPAVAEGERLWKQDASLRRLVPDLKTLVGTTPAALASKIGQDKADALMVYLRRHPEAITQQQAGSLSLVRSRLTESLAAYRAGDRQHAGELALSAYLDGFETVEPTLGARDRTLMERIEGAMGDYRAAIQSGENADALADRVQVLDELFDDAEASLSPDAASGLSTFLGAATILLREGLEALLIVVAMIAFLRKAERTEVMPYVHAGWVGALVAGFVTWVVATWVIGISGASRELTEGFGSVFAAVVLLSVGIWMHGKAQADQWQRYIREKMAKALSGSSAWLLFGLAFIVVYREVFETILFYAALWSQGNGATVLAGALSACAALAVIAWAMLRYSRRLPVGKFFSYSSWLMAVLTVVLAGKGIAALQEAGIVSIAPLRSVPRISLVGLFPTMQTIAAQVLMTAAVAIGFALNRRRAA

SEQ ID NO: 15865 - protein, 72 aa, BradyrhizobiumColbertium
MLFQIGDYVAGAVIGMATALLVRLVIWPGTDMVVAMLLGMGLGTIVSLLLSYLLAPMLGIVETMVPGSLTGM

SEQ ID NO: 15866 - protein, 201 aa, BradyrhizobiumColbertium
MDVQTQEKWDRASRTYDFFGAVDNKRLGLEKQRLLAKAQGKTLHVAAGTGNDFKFFPPGMHIVSIDISPKMLARAKIKAATYNGTIELREADVHSLDYPDSTFDTVATVFTFCSVPQPITGLRELYRVLKSGGRILMLEHVRSTAIGPLGIMMDLMSQLTRRFGPELNRDTVANVQRAGFRLRRVENIYPDIVRSIEAVKD

SEQ ID NO: 15867 - protein, 187 aa, BradyrhizobiumColbertium
MSISAWIILAVVVVIVLFGFVSYNRLVAMRQQCNQAFADIDVQLRQRHDLIPNLVETVKGYASHERDTLDAVVQARNAAVAAQDSATGAEAESMLGGALRQLFALAEAYPSLKANSNFQQLQSDLTKIENRLAAARRSFNAMVQRYNSMIQQFPVVLFARALGFAPHEFFGLGDQRRAVDEAAQVKP

SEQ ID NO: 15868 - protein, 386 aa, BradyrhizobiumColbertium
MNDRHDASEEFSLERQRRAGRVSAREKGEDEIATAPKKPSSPEVTDSAFPDRIRRKYYVVASESEKDGSDARLYADERKEYLAFKATDDRLVTRIAAAEVIRDMVSVAQHRQWEAVHVRGSVEFRREAWLEASARGIEVQGYQPNELDRQALADRRTAWDRAHARTNDVKTRSDSGKSSLGDRLDYDKGVSGRLMEVGFGPYRNRADAEPSTYVAIELDDGRRHQVWGVGVVTDVADSGARPGDRISLRRDGVAPIIRSIKSIDAATGAAGIERRQMWRNMWKVTVEERRADRTAAAHDSDLLAAQSQIVVINKLVERALPNDENARQSIMAFAKERIAQHLEKGHSFARATVMEPVRERHQAGRGGEMVAESQSGERMRMQERER

SEQ ID NO: 15869 - protein, 648 aa, BradyrhizobiumColbertium
MTPFANATTPVKAAQGTALALGAAAVFLLVASNVLLLGLRLHDGGFHWSEIATGWPRYGEDPRFDRWLTLSTLAGLIVVFGLLGAVLRHRPPPLHGKARFASEREIGAAGLRSKEGLLLGRKDGKMLCFGGSEHVLLYAPTRAGKGVGYVIPNLLNWPDSVVALDVKKENWDRSAGFRAAHGQEVHLFDPLDETGRTARYNPLGYVRSDPADLYDDLQRIAVMLFPAESRGDPFWFEAARSSFVAIGGYVAETPGLPLTIGEILRQLSATQNLKAHFDKIIADRKAGPSPLSRHCITALNDFLAASENTLNSVRKTVTARLGLWLNPRIDAATSSNDFDLRQLRQQPMSIYLGVTPDNLDRMAPLLNLFFQQVVDLNTRELPEQNPKLARKLLLLLDEFPALGNVNVLAKSVAFVAGYGIRLLTVVQSPAQLRAIYGVDAARNFMTNHAVEVVFAPKEQDVANELSERIGYETVNARSRSGPKGLAMRAISETVSEHRRALMLPQELKLLPKSKAFILGTGIPPIIADKIIYYEDKSFLERLLPAPVPELPKGRSNALLDAELKELRSEIAELRAVFRKRPMTDEEVADPSTIPAEASFDFGDVDVDLEGLSEDDLKAWTLKYIDAQVIPPARRTGRKQTSEQHERQA

SEQ ID NO: 15870 - protein, 343 aa, BradyrhizobiumColbertium
MSQVASIGHDGGRLVLARYLEPLAPYLTDDTLTEIVVNRPGEIFVEGPDGWTRHQSEALTQTYLSHLATAAASHTRQDIGPEYPVLSTSLIGEERCQIVVPPAVPGGMISLTIRKPSTLTMNLDALERVRLFDEVRSASDELDADEHRLLALKEAGQWREFLELAVRTRRNILISGATGSGKTTLSKALIAAIPAHERLITIEDTAELVIPHQNCVRLLYAKDGQGVAKIGPRELLESSLRMRPDRILLQELRDGTAFFYLRNVNSGHPGSITTVHADSARLAFEQMTLLVKESAEGRDLHRDDIRSLLLHLVDVVVQMQKRNGRYRISEIYYDPVRKRDHAR

SEQ ID NO: 15871 - protein, 381 aa, BradyrhizobiumColbertium
MTELEHETLAGERGITPVGGGDNGRTAMLKRGFGALALTAFAFLIIWGTWKSDKPVSESARKLMIRQAAAFEPAAEAPAAPITTASIPVAPISATPAAPAPAPDQMLESARRAPVLAYNRPVASGRSARDVPSAGVPVDPYDFGRAEPRNELADKLKPTPIEGVRAARLPNRNLLVTQGTSIPCVLETAMSSDVAGFVSCVVLRDVMSDSGNVVLMEKGTQVVGEYRGNVRRGSKRMFVLWARAKTPTGVIVALASPATDALGRAGFDGDIDTHFWERFGSALLLSIVGDASSIGRQQLQDGSIQINNTAGATNTAAGIAVEQSINIPPTLSKNQGELVNIFVARDLDFSSVYQLKRIESRTQILDRTLPGGIVGPATVTK

SEQ ID NO: 15872 - protein, 283 aa, BradyrhizobiumColbertium
MKRFAILMTLALGLAGPVLALQQPTPGQHDARVRTVTYDPANVVRLNGVIRASTQVVFADDEEIAHVAIGDAIAWEVAPAGSILFLKPREKHPSTNLQVVTTRADGRKRSYQFELSIAETTLADSYFVVRFAYPGDEIERRRVEAAARGAEREGALIDQTFDLHHAYGARNWRFSAQGSIDLEPEAVFDDGKETTFRFAGNREIPAIYLINSDGSESLVPKDVRGELVVVHATAREFRLRKGETVLCIFNEAFDAVGVNPGTNTTSPSVERRAKRSSPTLKAR

SEQ ID NO: 15873 - protein, 53 aa, BradyrhizobiumColbertium
MKETRKGEETHITHWVSTLTFSYANAPMSSADRLINPLGFLVSEYRADPEVVP

SEQ ID NO: 15874 - protein, 324 aa, BradyrhizobiumColbertium
MKFWTRKKFKDTAQLKKKINPTRVPIEKKESVRWLDNLRQSIERLGQPARCIHIGDRESDIYELYCLTQELGAHFLVRACVDRLAGDGGHTIATEMEETSVKGLHYIDVRNDKGETTKAALEIKFKRIAVLPPIGKQKRYPALDLTIIHATERGTPKGRKPIEWKLITDLAVRSRSEAIEKINWYAMRWKIEVFHKILKSGCKAEDSKLRTAERLANLMAVFCILSWRVLWLTMLNRIAPDASPKLALTDTEIALLDRLISGASHRRCRPGTLAFYLTKLARLGGYLARAADPPPGNVVIWRGLSRLTDIELGAEIGAAGNVGN

SEQ ID NO: 15875 - protein, 280 aa, BradyrhizobiumColbertium
MTLAPDVLDIVNDMKARGEPFALATVVRTVSLTAAKAGAKAVILRDGTMTAGWIGGGCARANVLKAARQSLSDGQPRLISVQPKDVLEEHGLKAGESHDGVLYANNMCPSHGTMDIFVEPILPRPQLYVCGASPVAVAIAAIAQRMGFFVSVCAPAADHALFGDTDRLVDGYEIPADSGGNRYVVVSTQGRGDTAALKSALAAQSTYVAFVGSRKKAAVLKDELAAAGVPPLQLETLRAPAGLDLGAITPDEIALSIVAEMVEVRRRGQRRAEQQEEGHV

SEQ ID NO: 15876 - protein, 42 aa, BradyrhizobiumColbertium
MEERQTPAIKLEIAIGDVVLRTDTAIDGEQLSRVIRAVRASR

SEQ ID NO: 15877 - protein, 101 aa, BradyrhizobiumColbertium
MIAAGADLKIYVAMRPIDFRCGQDGLAAKVQEMLRLDPFSGAAFVFRSKRADRIKILVWDRTGPVLVHKRLEGCKFVWPRIADGVMRMSPAMFAALLEGAC

SEQ ID NO: 15878 - protein, 506 aa, BradyrhizobiumColbertium
MGSELVKPDHLDRKAVVYVRQSTPHQVITNQESLKLQYALSQRARDLGWREADIDVIDSDLGQSGAAAAHRKGFKDLVARVTLGEIGLILSMDVTRLARNCSDWYPLLDVCGHRRCLIADRDGIYDPGTPNGRLLLGLKGTISELELHTIKSRMTTGLMAKAERGDLALQLPAGLVRDPSGVVTKDPNLEVQGRLLLLFETFLKVRTAAQVMRAFVARGLALPRRDRHGDLRWQPATVSAVTAILKNPAYAGAFVYGRTWQKPSQRPGERPQKSPRRGTDWRIVVREKYPTYIDWETFEKIQAMLRDNRAEYQHIESRGIPRDGAALLHGITYCGECGHKMAVRYKGGSQYVCNHLKIQRGAPECQNLRAAPIDAQVTAAFLEAVAPAEIDALSKARKTHLQSERALRHAEEQQIERLRYQAALAERQFNRADPDNRLVTGELERRWEAALLELRRAEEALAQRKVPKANDPIGVAHDLRAKVIGRASLAMGSGQSPAGHGPAHSA

SEQ ID NO: 15879 - protein, 529 aa, BradyrhizobiumColbertium
MSIAALRDENEQLKALLAQTQAALSEHQGALAASEEARRRLEIILGELRREKFGAKSEKLRPDQYHLPLEDVEIAQGVLDAAQEKAAAVIRGRSRTGSDQDRHRNRGCLPAHLPQVERILEPASTLCPCGCGAMTKIGEDVSKRLDVIPAQWRVLVTRRPKYICRRCSGPVVQAHAPEHVVPGGLPTEAAIAHVIVSKFGDHTPFYRQAEIYARQGIRLDRATLGNWSGRACFHLQPVADHMRRHLAAADRLFMDETTAPVLDPGRGQTKKGYFWAIVSDDRGHSGPSPPIVLFRYAPGRSGAFAEQFLDGFNGRFLQCDAYDGYDRLSEVARRQGPWTLVHCWSHLRRRFVKLARNSKSPIAEAAVRQIAQLYAIEAMVRGSSPDIRLAARKEHSLPIVEALKPWFEKQLSMISSGSTLADDIRHALNHWQGLTRFLDDGRLELDTNPVENAIRPVCLTRKNALFAGHEVGAENWALLASIVATCKLSDVNPAAYIAETLEAIIDGHPHRRIEDLMPWRFRKASSLRP

SEQ ID NO: 15880 - protein, 174 aa, BradyrhizobiumColbertium
MGFYSQWLFPRILDLAMKQKQIVRFRERIGETAEGSVLDLGIGSGVNLPFYGSRVRRVYGIDPSPELLKFARERARDAEAPVELVCGSGEAMPLESKSIDTVAVTFTLCSVSDPITTLAEARRVLKPAAVCSSLIASPTISCDPPASSSIPLETGYLRGPRPMVFVYSGSARPL

SEQ ID NO: 15881 - protein, 40 aa, BradyrhizobiumColbertium
MMMDMSGMSTAMMLGMGVIWLLILAFLVLGIAAFVKYLRS

SEQ ID NO: 15882 - protein, 79 aa, BradyrhizobiumColbertium
MRDALSDYLARHRLILYHSLAGVVAGGIAFNWHWLTVSETIRLLTALPCMLMMFKCFNCGTHRSTDEAVSAESRTAQTG

SEQ ID NO: 15883 - protein, 44 aa, BradyrhizobiumColbertium
MASVSFADQRARVLFDPQSIREDRLVNLIQKPGFRVVARETAGS

SEQ ID NO: 15884 - protein, 55 aa, BradyrhizobiumColbertium
MVPVQREQCRPPIRARILRRLGLAEGSSLHGVKVEAVPVAIVIAFSPFRSGNSMA

SEQ ID NO: 15885 - protein, 761 aa, BradyrhizobiumColbertium
MSLTHEQALVEYDPSIARPELFLQTLRDIGYTISDPSKLRPYEEEERDLVNEARRFVVAVVLSVAAIPIIADPGVGWIGFLPALVCLSFGAFVFLVLRSTGFWIAVASATGLAAMSLTLLFLNLQGYLTKAAPWLTGALALLLVFGVGRHILHMAIQALRRGILNQHVLLEIGAFAGIAGGIIGLVLGRPDYPTAPFFAVSVMVGTYHIFSEWLSLIVKTRSSQAVKRLLDLQPETARVVRGGTELELPLEAVRIGDLVRVRPGDRIPADGVVVSGHSGVDQSLVTGESIPIEKTEGATVVGGSINGTGTLLVRITALGEGSFLSQVIRQVEDARALKPGILHLVDRVLRVYTPTVLVVAALAVIGWLVGSSLSSGQPDIERAVFAGLSVLVMGYPCAVGISAPLSIVRGAGQAAERGILMRTGEAFQGFRLVEQIVLDKTGTLTEGRPVVREIMPLGTTESELLALAAAAEASSEHPLAQAIVTAAFERGVTPPDVESFEALPGKGITARISGREVVVGNPLFLAGQTIDLRPVTVKVEALETNGLTVIGVARDGRALGIIALGDTLRTDAAEAVRNLHRAGLRTALVTGDNERAAQWVAREVGIDEVHAGILPQDKAAIVRGLQAAGRVAMVGDGINDAPALMQADVGIAMGGGTDIAIESADIIILSNRLNALPEAREISSRSYRKMVQNVTLAFLFNGIGIPIAATGLIYPVWAMVAMAVSVTAIFFNSLWGTPRLFFDAIRSVGQPIVNAPARQSA

SEQ ID NO: 15886 - protein, 139 aa, BradyrhizobiumColbertium
MITIGKLAGLTSVSNDTLRYYEQEGLISPAGKSPAGYRLYDRDSARRIHFIKHAQQCGFTLAEIRDLLELRSRDKACCGDVRARAIEKKLQIESKIRAMKAMSKALDQLIAECAKEEQPVQECTIIAALERANGSKKVQ

SEQ ID NO: 15887 - protein, 84 aa, BradyrhizobiumColbertium
MEMFYSPGCAACEDRQAELRAAARDTVSGVEWCDVNVLENMDAAVALGVITLPSIVIDGEVAFTSLPTKAQLCKELIERRGSRK

SEQ ID NO: 15888 - protein, 222 aa, BradyrhizobiumColbertium
MEHAGFAAAGVAFAAGFLFSFNPVALASIPVSLAYVTKGRDKRQAFVFGSLFILGMVVTHVFLGFVAGLGGKWAADLTGREWGLVLGPLLIVLGLMWAGWLRIPLPSFGFRATRPTAAWGAFLLGIPFALAVCPACTPALVVLLGVTAGVGSAVLGSVLLLAFAVGRAIPIALGAFAVGWLENLKILSRYRRGFEIAGGVTLIVMGLYMLNAVYVWIPELAV

SEQ ID NO: 15889 - protein, 77 aa, BradyrhizobiumColbertium
MPKLTILSAATILLMMAATPVFAQSSQFAQQEPGAFAAMYPNAGIRHAVVRAPAHSLAALAYLPPGKSHAKGHVTRR

SEQ ID NO: 15890 - protein, 41 aa, BradyrhizobiumColbertium
MQRHEGGRFSDIPYDVTFAFAFYAFRPDSPIHKRTMAGPGN

SEQ ID NO: 15891 - protein, 184 aa, BradyrhizobiumColbertium
MDTEPVISLAIRDDARAYPLSVLIWHEIVNDLIGGTPVAVTYCPLCNASLVFDRALENRVLDFGTTGKLRNSDLVMYDRQTESWWQQFAGDAIVGVLSGKHLRLIASRVEAFSRFRQRFPNGQVLIPNDPRARNYGRNPYVGYDANGQKPFLYDGSLPDASIRWNASSPSKPGRGIARPGRFRC

SEQ ID NO: 15892 - protein, 133 aa, BradyrhizobiumColbertium
MQRAELAQRTGCNLETVRYYEKVGLLPAPPRTPAGYRSYDATHERRVRFILRARELGFALDEIRELLHLADERDQPCADVRAVAAAHLNDVRAKLADLRRMERVLKDVIAQCGNGTQPECPLMETLFRERASR

SEQ ID NO: 15893 - protein, 101 aa, BradyrhizobiumColbertium
MAASSCCIVPLVLFSLGIGGAWISRLTVLAPYKPLFIAATAGMLGYGFYVVYWKSGQACADGTACTRPVSTRIVRLSLWMATLIVLAAFGFDYVAPLLLGT

SEQ ID NO: 15894 - protein, 44 aa, BradyrhizobiumColbertium
MTVRSPATAAVADMTKAINAITDELLFMGKLLSFYQVPSNNGAT

SEQ ID NO: 15895 - protein, 50 aa, BradyrhizobiumColbertium
MAAVRGVANVTVSFEAKTATVTFDDVQTTPEAIAAASSNAGYPAHLKQGS

SEQ ID NO: 15896 - protein, 772 aa, BradyrhizobiumColbertium
MSECCKSASVRDQETLSGPATLPQFSLRPGVTFPDWSLVTSQAARDALLAIKDVLQVMAGSKNALDDWSESDRLIDRIRVILIQFYMEQRRAPMVCELAERAALSESTVRRLLEQLRERDLVVLENGKIVGAYPFTDRNTGHHVTLSSGTINAMCAIDALGVGAMTRRDVTVASSCSYCSAPIRITTRGLGRELARVDPEIAVVWQSVRYHGACAAESLCRDTSFFCSVDHLAKWRRERCADEPGIQLRMDEALQMARALFDPILANLDAESSADRESVSRDKPHSIPPFSKAAPETHRYDRPLGRIDGGYDLVAVGAGSAGFSAAITAAEQGARVALVGSGTIGGTCVNVGCVPSKTLIRAAEQLHNTRAAARFAGISAQAAVIDWRATVHQKDTLVAELRQAKYVDLLPAYPNIDFRQGRARLVEDGVEVDGMHLPASKIIIATGARPAIPAISGLEAVPYLTSTTALDLESLPRSLLVVGGGYVGAELAQMFARAGVKVTLVCRSHLLPEAEPEIGAALSRYFEVEGISVIAGVGYREIRNIGEGISLKATRDGRDMTIEADQVLIATGRTPNIEGLGLPECGIATAPKGGIAVDEHMRTTRAGVYAAGDVTGRDQFVYMAAYGARLAAINALRGDRLSYDSRAMPAIVFTDPQVASVGLTEKAARDAGYDVRVATIGLDQVPRALAARDTRGLFKLVSDARTDRLIGAHILAPEGADSIQTATLAIRQGLTVADLVDTIFPYLTTVEGLKLAALSFTKEVSKLSCCAT

SEQ ID NO: 15897 - protein, 108 aa, BradyrhizobiumColbertium
MSNRTLSALVAGAFAAAVGSLAATPAPAADPKMEKMMKDADASIKAGKMEKCYGVALKAQNDCAAGAGTTCAATGTVDYQGNAFKLVAKGTCTTMQTPKGPGSLTPKA

SEQ ID NO: 15898 - protein, 295 aa, BradyrhizobiumColbertium
MLLSSSPAKDRIPPRGGVGLKAEHCRTIVETWPDIGFFEVHAENYMGAGGPPHRYLSAIREHYPLSLHGVGLSIGADRPLDKDHLQRLKQLIERYEPGLFSEHLAWSSHDVGFFNDLLPVPYTAETLARVVEHVEQVQDCLGRQMLLENPSTYIAFAESTYSEIDFIAEVVRRTGCGLLLDVNNVYVASTNQQWDPYAYVDAYPLTQIREIHLAGHTKDADGKGRPLLIDTHNRPVDEIVWDLYDHTVRLTGPLPTLIEWDADVPAWPVLQQEAERAEAIMLATKSEAVRRAAAR

SEQ ID NO: 15899 - protein, 261 aa, BradyrhizobiumColbertium
MRQLAERQRDFAAALLDPGLPTPHGLVDPDGEPDPKRFAIYRNNVVVSLIEALADAFPAVHRIVGAEFFRAMARVYVRVQPPRSPIMLDYGAGLPDFIRSFEPAAVLPYLEDVARIERAWTEAYHAPEASPIDPSVFNAVAPDQLPAIQLERHPSLRVVRSQFPALTIWQMNVADGVPAPVDLAAGGEDALIVRPAAVVEVRLIPKGSLEFIRALSGGRPVLAALGAALIANPRFDLSANLSDLMRAGAIVSYSLAQENPT

SEQ ID NO: 15900 - protein, 154 aa, BradyrhizobiumColbertium
MIPHATIATIENAVRELADWLARAAQVAAPPMLRIALAVPFFKSGLTKWDGFLSLSPAAEFLFEDEFKLHILGQAYDLPFPTAVAYLDGRRDRAARSACYRSCDPLFGAGSPGHDRSDPARGARGVGEFSPSLGGPGAGHYCARPRSALPRPFA

SEQ ID NO: 15901 - protein, 169 aa, BradyrhizobiumColbertium
MTISIYEASVGLFVPYLHNLSVLLDKGVAYAETRKFDPTVLLGMRLAPNMYDLAQQIGEACRHATVAPALLAEREPVTLPVLEHDMAGLQARIATSVEFIQSLPRAKIDGAAERDVVFRLKNGSELPFTGRTLLLTFSLPQFFFHVTTAYDILRHAGVELVKKDYLGRK

SEQ ID NO: 15902 - protein, 119 aa, BradyrhizobiumColbertium
MGEQPSVEEHNVLDEHPVVEEQPLAPEHTDADGYSKVGPGPMVAIRLKWTVHRGDDGQYYVHETIGEQSAPVVSGPMTSEAAVRFVDGQQDEANKRFELLRSEIAGRSSLADYERKGEA

SEQ ID NO: 15903 - protein, 48 aa, BradyrhizobiumColbertium
MLFDGRLLAHEDDFSLSNNLGFPDNERRLGIFQNARDGRKRMVGRVDL

SEQ ID NO: 15904 - protein, 329 aa, BradyrhizobiumColbertium
MATNKKKIFVTQTLSRGARALLTQRDDIELVEFPNLISAKDFEALLKSHAPVHGVALGATAFGETELEASKDMKVVTRIGVGYDAVDVPALSRRKVPLMVAGSANSPSVAEAALFMMLTLAKRAQELHACVKDGKWADRLGMLPFDLYGKTVLIVGFGRIGSRTAKRCLAFEMNVQVYDPYKEAAEIKAAGCEPVTDLDAALPGADFVTIHCPKTPETVGLFDAARIGRMKPKAYLINTARGGIVKESALYDALTSGRLAGAGIDVFEVEPPPVGNALFALPNVIIAPHVAGVTVEAVERMSEQTARNILSVLDGDPIRQNVINQDVLG

SEQ ID NO: 15905 - protein, 277 aa, BradyrhizobiumColbertium
MTVAENMSFGLRLKHYPKAEIKARVTEAARLLDITDLIDRKPKQLSGGQRQRVAMGRAIVRNPKVFLFDEPLSNLDAKLRVQMRIEIKKVHQKVRTTTVYVTHDQVEAMTLADRVVVMNKGRIEQIGTPNELYHKPATRFVAGFIGSPAMNFIPCRLEDVGGTLQIRLTDRLAFPLPPARAARYNALPRTEKLLLGLRPEHLTESHAHLEPGVETFDTVLDVTEPMGMETLVYFGLEGTPVCGRVNPNAGAKDGGPMRLAMDLNNMHLLNEETGVVL

SEQ ID NO: 15906 - protein, 303 aa, BradyrhizobiumColbertium
MSTLAIDKGGPTRKIKYRSMSRDRAWALRWSYFFLVVFAIFSLTPPIYMLITSLKSSAEISAATNPWWVFHPTLANYVELLTSNQFLRFFWNSAIVSIVVVIVTMLISIPAAFALARMKFWGSTTLATGVFLTYLVPDSLLFIPLFKMLAVVQDLTGITLLNRWYVLLFIYPTLTVPFCTWIMIGYFASIPKELDEAALIDGASWLQTLTRIFIPVALPGLIAATIFAFTVSWAQFLYPLVFTTSVDQLVLPVGITTTLIKGDVFNWGQIMTGALLGAAPPLIIYAFLMDYYIAGLTAGATKG

SEQ ID NO: 15907 - protein, 312 aa, BradyrhizobiumColbertium
MADVVVEQGRSVHAASPRKRTSLRNALRRKSTMAFFLTLPLILLIALLVLYPAFYSMHLATLNKSMQKFVGFANFTFLFKRDTFWMVVRQSCIFAITAVFFKALLGFIVAHFVHNLPAKGQRKWRGMLLVPWVIPPAMSTLAWLWLFDPSYSAFNYTLSFFGVGPVPWLGDTFWARFSVILVNVWYGAPFFMIMYLAALKSVPDQLYEAAAIDGANWWQRIWYVTLPMMRNIIAITTLFSLIVTFANFDIVRILTSGGPLDSTHIFATWAFQVGIQSSDIPLGACVSLFMVPILAVAAIFILRDVSKRGNEA

SEQ ID NO: 15908 - protein, 446 aa, BradyrhizobiumColbertium
MSRKTLTRRQFVAATAMSSAALITAPYVRGAYAAGKLSIGFWDHWVPGANKASTDLVNEWAAKEKVEVSIDYITSNNKKLELTVAAEAQAKSGHDILQMPTWWPHAYADQLEPVNDIMEPIIKQNGDVNGTVKYLGQGGGKWLAVPATVGSQIKGPCSRIDLMKKHAGIDVQAMYPAGSAPKADNWTMDTFLKAAEACQKAGVAFGIGLGETTDSVDTAGAIFQSFGAELVNAKGDVTVKTDAVRQALEFYKKLIAVLPPDAASWDDASNNKWLISGRGALILNPPSAWAVAKRDAPQIAEQCWTHSMPAGPKGRFAPFLPYFWGVWAFGKNKPAAKSLLAHLSQPSSIEKFVAASGGYDLPAFANLTKLKTWAEEGPPKGTLYHYPDPHGSQTMSIAASPAPPKIAQQIYSQATLTKLALRYARGETMDQALAWAEGECEGFMRS

SEQ ID NO: 15909 - protein, 261 aa, BradyrhizobiumColbertium
MINPAHTALLHLRRWFALGTVLALLLGAAAPANAQGLVKGVQEGAEAGNKAAGPVGGVLGGAIGGVVGVFTGVLGVGGNNQPPAPKESGKDAKQQGVAKDKDAKSAKTGKNAKASKEAKNAPRDKSSKENKGVTVLTQPGAPQQSAEQIVANSDAYIERIKSELNLTPDQEKHWYGFSSAMHYLGHNGAERLNLRIARAKRDPPDDIIEQMRNEAQFLIDRAADQRNVADAAEPLYSSLDDKQKQVFIQEMVRLSHERGLD

SEQ ID NO: 15910 - protein, 125 aa, BradyrhizobiumColbertium
MADGLSVFLVEDEALIRMMIADMVEELGHHVVAEADNVRDASAFAMTAQYDLAILDINLMGVYVDPVADLIERRGKPFLFATGYGPELLPSLLRRRPILRKPIAMDQLKAMIDSMFPERPATNPN

SEQ ID NO: 15911 - protein, 67 aa, BradyrhizobiumColbertium
MRKQDLGFDYHRYHRLLSEADNEDKRLALIELLIAERARERLAAQRASDRAAMTAHTIARVLRNGRD

SEQ ID NO: 15912 - protein, 328 aa, BradyrhizobiumColbertium
MGIGKSGKILLADIGGTNARFALSSSESNDGSQTGPIDYVKVADFPTVGEAIADVLARRSGDEPPQRAVLAVAGPVTNNRCVMTNSPWVIDGNELQPALGLDSVHVLNDFEVVAWSLPALQPADLIPLGGGDGLPGEPLLVAGPGTGFGVSCLIERHGARLAVVTEAGHATLPAENEREERVIACLRKRLGHVSIERGALSGSGLQNLYEALAEVESAQVPHRDAASITKAALEGSCPISQATLQMFCAILGSVAGNLAVTFGARGGVYIAGGIVPRFRDFLAASAFRARFEAKGRFQDYLRNIPTRLVIKPDASFVGLKMFADHTAD

SEQ ID NO: 15913 - protein, 208 aa, BradyrhizobiumColbertium
MKISDRDVLLVIDVQNDFCTGGALAVPGGEKVVPAVNRIAQKFANVVLTQDWHPRDHISFAPNHEGKQPFQTIELDYGTQVLWPPHCLQGTAGAEFHRDLDVTRATLVVRKGFRRGIDSYSALFENDHRTPTGLLGYLRERDLKSVFVADLALDFCVRFSAEDARKAGLEVAVIEDACRGIDLDGSVAATHKSFREFGISVVSLEAFL

SEQ ID NO: 15914 - protein, 352 aa, BradyrhizobiumColbertium
MLWPFAAARLAMDACFWWMERGPTEPAQSSLPWTTPSTVALELATMRLRDCSQGHSGQAALICAPYALHRALIADFAPGHSVVQSLQGGGIGRVYLTDWRSATPEMRYLSIDNYLGDLNVAVDEIGAPVDLIGLCQGGWLSLLYAARFPTKVRRLVLVGAPVDVSIASSLSRLARDAPELVYDQLVARGGGNVSGEEMLRLWSKAPSRDDIVAALQRDLSDEQGAALLARFDRWNAETLNLPGRYYLEIVNGIFRENRIASGNFVALGRTVDLKDVRVPVFLLAGLDDDVVPAAQAFATAGLLGTPPAFIAAASEQSNHLGLFMGARTHAHAWPRIAAWLRDDLPGALARSA

SEQ ID NO: 15915 - protein, 664 aa, BradyrhizobiumColbertium
MAACVTTSHVADPTANAKAVLAAAEACHEQSAAVAVFPELCLSGYAIEDLVKQDPLLDAVERGLASIVEASVGLMTVLIVGAPLRFGNRIYNCAVVIHRGNVLGVVPKSYLPTYREFYEGRHFASGAGISGETIAFGGLHAPFGVDLLFSAEDVPGLTIGVEICEDMWIPVTPASELALAGASVLINLSGSPITIGRARSRALLCQSTSARCLAAYVYAAAGAGESTTDLAWDGQTSIYENGVLLAEGERFRQGGQITLADIDLDLLRQERALMGTFDDNRRQREAFYRKVTFAMKPPAADIGFLRKIERFPFVPSDESLLEQDCYEAYNIQVAGLVQRMRATGTKRVVIGVSGGLDSTHALIVAAKAVDLLGLPRENILAYTMPGFATGSESKTRALALMQALHTSWQELDIRTTATQMLKDIGHPFGKGEKVYDVTFENVQAGLRTDYLFRLANHHGGIVIGTGDLSELALGWCTYGVGDQMAHYNVNAGVPKTLIQHLIRWVISSRQFSDDVNRTLGSILVAEISPELVPVEAGEKPQSTEAAVGPYELQDFNLFYTLRFGMRPSKIAFMAQHAWKDVAKGEWPPAFPNDRRRAYDLPEIRRWLEVFLRRFFAFSQFKRSAMPNGPKVSAGGSLSPRGDWRAPSDSSASAWLEDLERNVPG

SEQ ID NO: 15916 - protein, 127 aa, BradyrhizobiumColbertium
MSAGDGAGTGEEAKVTNGLYIFDIEMRDGKRGQARGVVVLCDGRIMGGDSYFCYTGSYSFRNGKWRGDMIVNQHTEAVGRMLAFGGREVTCGFSGDYFPGGAEVEGMALVGKTSVTFTARLTLKDAM

SEQ ID NO: 15917 - protein, 184 aa, BradyrhizobiumColbertium
MTTEKQVRISETARRARLAPPVRNLNVSIRVGETIPSRVRLHRLPPEIIAIEPQYRGYEYFSTEEDIVIVEPRTQRIVSQVPRDPSRARAQMGGSGTSNVAAAGSNTSSNLNCRIMRRDASGNVAEAEPTTVGSTARMDSMNVTVQMPGGGTSAPIALDAAAGSILVATQGQGDCTVTIEPQAR

SEQ ID NO: 15918 - protein, 291 aa, BradyrhizobiumColbertium
MLRTQIAAAIGCARASALDEIMREVWTRYSAGQLTEEDAGQLSTLAHERREAWRGSGQAGLGLVMPPAERCPTPVRRHSHIRGRSEGRIWRSTTRKDVQAILKAAEIYNEAGLHEKGERSGPLGSVALDVLRLFVNLIDFRTGRLEPSITTIMDRLGRSRDTIVRALKNLRAHGFIDWLRRYEPTGNEGRGPQVQQTSNAYRLSLPEKARQFLGRFGKAPPPPADHGQDQQAWSEAIDAYKTTLPLDERTQLDTGDSPLGKALVMLAKSVMKRESDNQTESPSDLYLRGQT

SEQ ID NO: 15919 - protein, 121 aa, BradyrhizobiumColbertium
MRWLARKMRQDIWDEAIEGPLGDIEAAARIRAICDSASAIAAQAGERQRYERAARVAMEVAMKMSDDLMRDDAVRRIVNLCMKADDLKTAQILSRAIQAGWIREAVQRDHPTLSQEAPARA

SEQ ID NO: 15920 - protein, 474 aa, BradyrhizobiumColbertium
MGTPITNNPPRPEPKALASALEQLAARFGNRLITSQAVREQHGHTTTWLPNQPPDGVVMAQETADIQDVVRICARNRVPVIAFGTGTSLEGQVNAPAGGISIDLRDMNKVLAVHAEDLDCVIQPGVTRKALNEHLRDQGLFFPIDPGADASLGGMASTRASGTNAVRYGTMRDSVLALKVVRGDGEIITTGTRAKKSSAGYDLTHLFVGAEGTLGIISELTIRLRGIPETIAAGAVSFGTVHGACQAVILAIQTGIPVARIELLNAAQVKACNAYSKLTLPETPLLLMEFHGSEIEVAEQSKAFGEIAKECGGGDFSWTTKPEDRTKLWQARHDAYWSVKALRPGDSIGVVATDVCVPISRLADCVGETEEDLKRLNLLSPIVGHVGDGNFHCSLVCDINDPDEMARGEEFMHRLVERAQSMDGTCTGEHGIGQGKQKYLKAELGPEAIEAMRALKKALDPLNILNPGKIVPEA

SEQ ID NO: 15921 - protein, 168 aa, BradyrhizobiumColbertium
MPDTAASAPKAGPFRASIMQIEPHWIDYNGHLNMAYYNVMFDRAIDQLWLELGIGPGYMKERGGSTFTAECHVRYLREIHLGDPVQIFVWLLEADDKRLHTFEEMRHASEGWLSATSENMSLHMDMSARRVAPFPPDIRERIAVVTKAHSAVARPEGIGRNVAMPSKR

SEQ ID NO: 15922 - protein, 75 aa, BradyrhizobiumColbertium
MWRGKPRRRRQHQDEGLTMLGWVVTFLVIALIAGILGFGGIAGASIEIAKIIFFIAVVLFLVSAVVGLARGRNRI

SEQ ID NO: 15923 - protein, 855 aa, BradyrhizobiumColbertium
MIRMTEPSKITAVPDHQPAAGGIAARARASVGPKYLSGLNPEQREAVETLDGPVLVLAGAGTGKTRVLTTRIAHILSQGRARPAEILSVTFTNKAAREMKHRLGQMLGHAVEGMPWLGTFHSIGGRILRIHAELAQLKSNFTVLDVDDQVRLLKQLLQAENIDDKRWPARMLAGLIDGWKNRGLMPSQVPSGEAAMFANGKGGKLYASYQERLKILNAADFGDLLLENIRIFREHPDILRQYQQRFKFILVDEYQDTNVAQYLWLRLLSQAPSSSSSLPGLTRQSIASSQDGSPGLDAARRPDDERHDARLVSASEKGPTRNICCVGDDDQSIYGWRGAEVDNILRFEHDFPGAKVIRLERNYRSTGHILAAASHLIAHNEGRLGKTLRTEDQDGEKVTVTGSWDSEEEARGIGEEIEQLQRQGEKLNEIAILVRASYQMREFEDRFVTLGLSYRVIGGPRFYERAEIRDALAYLRVINSPADDLAFERIVNTPKRGLGDATVQMLHDHARKRRIPLFEAARAVVETDELKPKARGSLRDLIAQFDRWRAQREVTAHTDLAQIVLDESGYTEMWQKDRSADAAGRLENLKELVRSMEEFENLQGFLEHISLVMDREGGAEDDAVSLMTLHSAKGLEFDNVFLPGWEEGLFPSQRTLDEQGRAGLEEERRLGHVGLTRARRRAKIYFATNRRIHGTWSTTIPSRFLDELPAANVEITESKGGSGWGGSGGYGASRFDDMEAFGSSYSTPGWQRAQANRNRGGGRSGFEEETATFSSASSSGPDFGSFSSRRRGPMTIEGELVAKSTGTTSEFALDDRVFHQKFGYGRVTRIDGNKLTIAFDKAGEKKVVDSFVQRA

SEQ ID NO: 15924 - protein, 94 aa, BradyrhizobiumColbertium
MAQYVAIIEDAAPDAVSLWFPDLPGCISGGDDVDEALENAPEAIAFYAQELIAEGRELPPPRTLDELRAAPEFADDLRNHTAVLVEWPPLPAAD

SEQ ID NO: 15925 - protein, 129 aa, BradyrhizobiumColbertium
MLALGMPSLAAAETMSFGDSIGKLAASCGAEIIANCRGVNPDSNRLKECLSRNRDVLSPQCASDYLGAFEAIQKRVAARVTVANACQREIVKVCGGSTKETSKSIPCLVSTPKGISNNCLKAVDDAGYR

SEQ ID NO: 15926 - protein, 221 aa, BradyrhizobiumColbertium
MRAPRHIMTGAAVALGLALLPGTAGAQTSAPTRDEIVSKLNRFEEAAELDLPTLKQQVMERAKTRIKNDPGPVNRPLIAPDLAKLPAFNAQIQFDTDTPIIQPASYQTVGRIADALVHSSLLPYTFLIVGHVESNSKTREANAILSQRRADAIRDVLVNTFKISTKRLHPIGLGEEQLLDRAKPTSPVNGQLQILTYAKLPEEAPRPAAPAPAAKKPARKH

SEQ ID NO: 15927 - protein, 172 aa, BradyrhizobiumColbertium
MGGFFQRQLAVYVEYHRDPRNTAMHVIGILLLFTGAVLPLTLVKFPLFGFDVSLAVILALPVLIYWLLLDVALGLGILAVSIVLFSVATTITAQVSIATMWAIFAALVVLGLAAQTIGHKVFEGREASLFTFPSHLLLGPMFVMAKLFIALGFRRDLAAILAPLPTNSLSAR

SEQ ID NO: 15928 - protein, 343 aa, BradyrhizobiumColbertium
MALVLVTGGSGFIGHHLVEALRARGQRVRVLDVRPPAAANADVEYAHASVLDRDAVDAALAGVDRVYHLAALPGMWVANKQDFHEVNCRGTEIVLAAAMKRGVSRFLHCSTESILFPYSDLKGVPAEEALQAAEAMPGAYTRSKALAEHHVAKAAAAGFPLVIGTPTMPIGAADHNLTPPTAMLWYFLQKKVQPHLDFLVNLVDVRDVAMGLLLTMERGRAGQRYILGGDCVTLGSVLRMMSAMSGRRQLPVVVPGKLAELSAIMLEYIADHVTRRPPNGTAEGVRIALAASDLSIGKARTELGYSPRPIEPVLRETITHLLARNGEQPSGALKHHALSSRAS

SEQ ID NO: 15929 - protein, 208 aa, BradyrhizobiumColbertium
MSFDFSKLLSVAWGGWTTTWPTQLLALIWLAWLASWIGASFWQGRTQKQVMTLESGRYRIPILVGGILFTPWTAEVLNEKPLWVFSNTAVYVTALIVLAGISFTWWGRLHLGKFWSNTITHKEDHRVIDTGPYGIVRHPIYTGLIAGMLATGIAVGTVTAILGAILISLGMWQKGRMEEVFLSKELGEDAYGAYCRRVPMIIPFLSPR

SEQ ID NO: 15930 - protein, 69 aa, BradyrhizobiumColbertium
MSDAYDYFREHAIAAVRKARALPRGRAKQKQRTVARVYHLLSREAALAPNIHHLEDFRAARRLERQIGR

SEQ ID NO: 15931 - protein, 434 aa, BradyrhizobiumColbertium
MTFSSIFAQFVALIGGIALQWRKMSGTEPAPAWGETPAIPEAKPQGAIPTLKMPTARGWREGQKPTVAPGLKANAFATGLDHPRWIEVLPNGDVLIAEATQIAGPPRTVFHFAMQATMRRAAALGVSANRITLLRDNDGDGVAEVRGAFMENLSQPFGMALVGDTFYVGNTDGVMAFPYVADADRITAPGKRLTTFKPGGHWTRSLLASPDGKKLYAGVGSLSNIAEMGMEVEEGRAAVYELDLAAGTHRIFASGLRNPVGLAWEPNTGVLWTVVNERDGLGDETPPDYLTSVRDGGFYGWPYCYWGRTVDDRVPQDPAMVAKALQPDYALGGHTASLGLCWMPAGTLPGFGDGMVIGQHGSWNRSKLSGYRLVFIPFENGKPSGPGRDILSGFLSPDEKESYGRPVGVAIGPDKTSLLMADDVGNVIWRVTGA

SEQ ID NO: 15932 - protein, 274 aa, BradyrhizobiumColbertium
MTGQRAAGELKVAIAGLGSIGTKIAAALDRGIEGLTLSAVAVRDPAKHHAFIGGLRRPPQIMPIDQLGGAADIVIECAPSRHLREIVEPAVKRGKTALVVSVGGLLDNFDLVDLARANGGRILVPTGALIGLDAVNAAAIGTIHSVKMVTRKPIDGLKGAPFIVENNIDIDKLREPLKLFEGTAREAAKGFPANLNVAVALSLAGVGPDRTEVQIWADPTVTRNVHRIEVEADSARFSMSIENIPSENPKTGIITALSVIALLRKQRATLCVGT

SEQ ID NO: 15933 - protein, 306 aa, BradyrhizobiumColbertium
MLAAVGLLALGTGATGASQARTKPAAATPVAPPPPPFEPLPPPKVYLFRGAMGPIFSTGMDRLGEKLTQAGFSADVYEFTLCRFIGNRVIASYKEKAAPIVLIGHSMGGLCSIVISEMAAEENVPISLVIAIDPAHATGDVPLNVERFINIFLSDSVLGGGDVVAVPGFRGHYASYDLKENARVSHINIEKSDDIHRQIVEMVTQLPRIPPQTQADAVPLRYLVPADTLVELWASGVRVPVRRGDTMESIAAANRVPLWTLAQSNSLPENAPLTPGQTIIVPRHLTPPEPAAAMAAPPVAPATSRK

SEQ ID NO: 15934 - protein, 242 aa, BradyrhizobiumColbertium
MSPNGRHTAGASQSSTLRMWAMGLLLLSAVAISPTAAKAAPSQAAVATTHVYLLRGVLNIFSLGLDTIGARLQARGVPVTVANFVSWSSLADEAAAAYRAGRLKTIILVGHSSGATALPDMIAKLNQLGVPVKLAIGLDSVFKTKLSTGADRYINIYIGDGPGEPVRAAAGFRGKLDNVDVRGTGVGHISIDKNEAIQRRVIAEIDAAIMRSRAPAAPAAPVADQGTPRQARSAAAAAPARN

SEQ ID NO: 15935 - protein, 307 aa, BradyrhizobiumColbertium
MPSIISVANLSKTYGSGFKALKNVNLDIKRGEIFALLGPNGAGKTTLISIICGIANPSEGRVLVGGEDIQTSYRKARSLIGLVPQELHTDAFESVWATVSFSRGLFGKPKNPAHIEKVLKDLSLWDKKDNKIITLSGGMKRRVMIAKALSHEPQILFLDEPTAGVDVELRKGMWEVVRGLQQSGVTIILTTHYIEEAEEMADRIGVINKGEIVLVEDKTTLMQKLGRKRLTLHLQNKVTSLPESLAHYELELCDEGATLVYDYDTQGERTGITSLLGDLRTAGIRFNDLDTTQSSLEDIFVDLVRTS

SEQ ID NO: 15936 - protein, 42 aa, BradyrhizobiumColbertium
MGAGQFFSRYPVRKIHQITTRQITRNASVMPTLTAMLTSAIS

SEQ ID NO: 15937 - protein, 190 aa, BradyrhizobiumColbertium
MQYACNPAFVPATWPPIVNATPDVSKPALWRESAAALTFSRSGPALTTPTIRHKSRNHSTASNVDRVHPAPAHAAKHLTDPGMNMNKAHVAALPAGSPVRLLFAAVALVLALLSLPQAGHAQGIVRGAREGAYEGNRIGGPVGGAVGGVVGAGVGGAVGAVEGVLGIPHRHSRRGCRGYYDRHHRFHCYR

SEQ ID NO: 15938 - protein, 264 aa, BradyrhizobiumColbertium
MRFQMRTFFIAFSTVLVLGTGTAQAKVEITVDKDNQQMIVAVDGVARYRWPVSTGVPSRETPNGSFRAFRMEEDHYSKEFDDAPMPHAIFFTKVGHAIHGTDSVGRLGSPASHGCVRLSRQNASALYALVQQQGVLNTTVTLTGSAQVAMARNPRGRNATTMARAPQPAEEQYATTGDPVNLTPPAQPARRYMPQDDNYIYPADGSDTGARYPAPRSAGRPLYDAQVYQQQPRPYYDQGYGQQGYYYQPQPRQYYQPRGYYYQN

SEQ ID NO: 15939 - protein, 331 aa, BradyrhizobiumColbertium
MPSRATTILIALWVLMAGPAMGSDATFDIEAHRGGRALLPENSLPAFANALSMGVDTLELDVGVTADGEVIVSHERGLNPDLSRRPDGTYITPPGTPFVKLRLDEVRTYDVGQIRPDSAYAKQFPSQRAVPGTRIPTLRELFALVRKSGNTKVRFNIETKIDPNRPDETLGPQDFVAKLLGVIESEGFSERVMIQSFDWRTLLVVQQQAPNIPTAYLTIQRGSSQTVTRDRATNWTADFNPSDHGGSLPRTIKAAGGAIWSPHFGDVTAALISEAHELGLRVVVWTVNKREDMTRMIELGVDGIISDSPDLLRQVAGARGIALPAGTPVEP

SEQ ID NO: 15940 - protein, 760 aa, BradyrhizobiumColbertium
MDSIVQPAATELPSSSRNRLLLAVYTAAIFVSALLLFSVQPLFTKMVLPRLGGSPAVWSVAMVFFQSLLLAGYAYAHLLMQVRNRVVPVAVHLVLLIAAFVMLPLGIASAYGEPPATGYAFWLLGLFVVSIGLPFFALAANNPLLQAWFVRTGHPAAHDPYFLYASSNIGSFLALLSYPFLLEPMFTLQMQNRFWTAGYGLLILLIGACGVLLLRSPKLALAVDARAEDVDAPAPSLSTRLRWIFLAAVPSGLLIAVTAHISTDVAAAPLLWVLPLSLYLLTWVVVFQSRPLLPHKWMLMLQPVAIAGVVLLLAYGGEQNLLLTLGGHQLCFFVIAMACHGELARTRPAARYLTGFYVALSFGGMVGGLFAGLVAPYTFSWIAEYPILIALAALCRPSANERLAGIARWYWLALAVLAVALVAPSYTTGDLTTWFEDHRVWVAGAIGVLAALLALVLNADRWKIFATVALALVLIRVYPADEGRVTTVRSFFGVHKIVVTPGGYFHVLMHGTTIHGAERFRNNDGTPVVGRPEPITYYHQDGGIGQAVSAIRERKGAPLKVAAIGVGSGTLACAAEPGESWTFFEIDQSMVDAARDPRNFRYIPSCMPDMKPVIGDARLTFAKEPDGAYDLVIVDAYSSDAIPIHLATEEAMKIYKDKLAPHGAVVMHVSNRHLDLETVVVGIADANDLKSWVFNEDSGRDSDYIFSTDVVISAREEADIGKLASSKQWEQTEADDRARVWTDDYSNILGALYRRWKNGE

SEQ ID NO: 15941 - protein, 536 aa, BradyrhizobiumColbertium
MTETDVVIIGAGHNGLTCAAYLAKAGLRVRVVERRKVVGGAAVTEEFHPGYRNSVAAYTVSLLNPQVIRDLRLAEHGLRIVERRAQNFLPAPDGSYLITGEGRTKASVARLSAHDAEALDGFSRELEGIADVLRQFVLRAPPNLPEGFGTSAIRESVNALKTANILRGLTLEQSRSLLDLFTRSAGEMLDERFEHDLVKALFGFDAIVGNYASPYAAGSAYVMLHHAFGEVNGKKGVWGHAIGGMGAIAQAMARAARECGAVIDTDAGVREVIVERDRAVGVVLENGSAIRAKYVAANVNPKLLYTHLVATNALPADFLARIRHWKNGSGTFRMNVALDHLPSFTALPGEGDHLSSGIILAPSLGYMDRAWLDARAQGWSREPVVEMLIPSTLDDTLAPEGKHVASLFCQHVAPQLPDGTSWDDRREEVADLMIATVDKYAPGFAASVLGRQILSPLDLERQFGLLGGDIFHGALTLNQLFSARPMLGHADYRGPLKGLYHCGSGAHPGGGVTGAPGHNAARAILRDHRSLFGRRG

SEQ ID NO: 15942 - protein, 54 aa, BradyrhizobiumColbertium
MKRMVQKFWSDESGATAIEYGLIAAGIALAIITVVNSLGTTMNEKFTSISTSLK

SEQ ID NO: 15943 - protein, 295 aa, BradyrhizobiumColbertium
MQSSPTHRASFSIGSEADAKRVVDVLTEVFFDGDAAVAAFERPDGQWDVTLHFAEPPDQARLRELVENSAGNAIAATLALDTIEARDWVKASLEDLVPVPAGRFVVHGSHDRDRVAPNKLAIEIEAALAFGTGHHGTTRGCLLLLDHVLKSSRPRNVLDLGTGTGVLAIAAAKALHRAVLASDIDPPSVRVAAENAALNEVGSLVRVIRATGFAAPDFARAGPFDLVLANILANPLRQLASPMVRHLSPGARVILSGLLTHQAPAVIAAYRARGLVPLRHLRIEEWSSLLLRKVS

SEQ ID NO: 15944 - protein, 62 aa, BradyrhizobiumColbertium
MPAFSFEKISPPLRGAPAAAAPRKPRGLISQMIDRVAERRARRALQDERAKRRDETPEQGGG

SEQ ID NO: 15945 - protein, 608 aa, BradyrhizobiumColbertium
MFEAHFQTFEEPEAGVALTARLAALREELARRKLTGFVVPRADQQQNEYVPPSEERLAWLTGFTGSAGLAVVLPQEAVVFVDGRYTLQAAKQVDATAWTVESLIDPPPESWVAARMKAGDRLGFDPWLHTFAAAERLAAACAKAGAELVAVDSNPIDAIWPDRPQPPLAPVAIHGIEHAGVTEAEKLTQIRGEIARLGADALVLSDSHAVAWTFNIRGADVAHTPLPLSYALVPKDGRPTIFIDHRKLSNLTRDHLEQSADVREPDAMAPTLMALAKGGGSIALDNATAADALSRLIAGAGGKPLRGSDPVALLKAVKNATEIKGTKTAHVRDAVALARFLAWIDREAPSGKLTEIDAVEALETFRRDTGALKDVSFPTISGTGPNGAIVHYRVTRKSNRRIASGDLLLIDSGAQYEDGTTDVTRTMAVGEPTDEMRDRFTRVLRGHIAIARAVFPDGTTGAQLDTLARQYLWAVGLDFEHGTGHGVGSYLSVHEGPARISKLGTTPLKRGMILSNEPGYYKTDGFGIRIENLELVVAADIEGAEKPMNAFETLTLAPIDRRLIDVAMLSRDELDWLNGYHARVRAEVRPALDGATKAWLDQATAELT

SEQ ID NO: 15946 - protein, 426 aa, BradyrhizobiumColbertium
MHGMTSKPPEAAPDRSVATSRVVLLLLVVMTGIAPISLYMLVPALPVLATNFGSDISIAQMTVSLYMVGIALSQLIMGPLSDRFGRRPVLLGGLALMVAASVACIFAQDLPQLIAARFFQALGGAAGMVVSRAIIRDIYERDRVASMISLVVAALMIGQMVSPLTGGLIETAFGWRAIFYAITIAAIVVAVGIAVALPETRRSRAAGSGFRGDVGVLIKSRAFVGYVMCQVLASQIIFTFAGGGPYIVVTQMDRSSAEYGAWFATTGLAYLVGNLLCVRFAPRHSLERLIWLGLGLQLCGSLLNLLWSFIGWNEAPAWLFGTQMIVMVGNAFVMANSAAGAISIRPEAAGTASGAMGFLQQGIGALMSQFGAYLGGHSATTLPLTSAVLAISLLCACVMIFVVPRRDMVVSEKLIEQAEEEERGMI

SEQ ID NO: 15947 - protein, 43 aa, BradyrhizobiumColbertium
MRGTPAPAASIQHPATATITHDRRSTLAAVDEDQCKLADLRRA

SEQ ID NO: 15948 - protein, 147 aa, BradyrhizobiumColbertium
MTERRAGYDSKSAIDPQDVANMLEAMKQIGLDISVPAVNEEARIGNVLYASGGCDPHDCSGFKPGSCSGVTCPTKSSACPTESCSTKVCANHTCQSVSCEKVSCNNYHHWESRASTHGALVEAMSSLPDGSWSQLSSRSLSAPDRAT

SEQ ID NO: 15949 - protein, 452 aa, BradyrhizobiumColbertium
MKISAYNCLTSSFVPGKHLAFNALTGAFLSLDDERLDDYATLLRSIDATGCPPDPVRPFQKTLIENGFVIPDECDEQAEISNRYHRGKAASRGLGLTIAPTITCNFGCSYCFQSHSNTRMDDERIDDLLTFVEARLEAGTSLSVTWFGGEPLGAFDVIEKLAPRLHALAVERDCTFGHSIITNGYLLTEPRAAFLASIPGFGDAQVTLDGARKHHDARRPTLAGNGTFDRILENLVAAARHIPILVRVNVDRRNIDGVEDLLDALIERGLRNVGVYLGHVWRYTDEVGATDLLTKEEFAAIETRFKFLKFRKGFAIGSSLPQPKLGALCSADSSNSFVLGPGGGIFNCWNEAHRDVHQAPGRYSPATEPHPGDVKQQWAGYEPSAKPACRSCHVAPLCMTGCPWEAAKLNDRGDCISARFNLADQLRLYDLEQSIALAEKARQPPARRTEIV

SEQ ID NO: 15950 - protein, 718 aa, BradyrhizobiumColbertium
MMARAAKSKAAPPRDVADLTKAQAKVEHMRLALEIEGHNERYYQEDAPTVTDAEYDALRQRFNAIEKRFPEFVTADSPSQKVGAAPSGRFRKVRHAVPMLSLDNAFAEEDVRDFVGRIVRFLKLDDDKINFSAEPKIDGLSMSLRYEGGELVTAATRGDGAVGEDVTANIRTLEDVPQKLKGRNVPDICEVRGEVYMTKKAFLALNERQKAEGGTIFANPRNSAAGSLRQKDPTITASRPLGFFAYAWGEMSAMPEDTQSGMIHWFERCGFRTNPLTKLCHSVEGLLAFHHAIEEQRARLDYDIDGVVYKVDRIDWQERLGFVSRTPRWGIAHKFPAERAMTVLRDIEIQVGRTGSFTPVGKLEPVGVGGVIVQNVTLHNEDYIKGIGNKGEVLREGRDIRIGDTVVIQRAGDVIPQVVDVVLDKRPKTAKEFHFPKKCPCPLHTDVVREETATGEEGSRARCTGEFACPYQKIEHLKLFVSRRAFDIDGLGEKQLQYFFDEGWVKEPADIFTLEKRNAKLKLEEVEGYGATSVRNLFGAIESRRRIALERFIYALGMRHVGETTALALARGYGSWDAFHDACLKVAKGDEEAIAEMDALDQIGDTVIKSIADYFGESHNRGIVERLTREVEIVDAEKPKSNSAVAGKTVVFTGSLEKMTRDEAKATAERLGAKVSGSVSKKTDLVVAGPGAGSKLADANKHGVKVLTEDEWLKLIGE

SEQ ID NO: 15951 - protein, 557 aa, BradyrhizobiumColbertium
MLARLSIRDIVLIERLDIEFASGLAVLTGETGAGKSILLDAFALALGGRGDAGLVRHGAEQGQVTAVFDVPKNHPAAKILAENGLDDTGEMILRRVQLADGRTRAFINDQSISVQTLKAVGAALVEIHGQHDERALVDAATHRRLLDAFAGLEKDVAAVESLWEARRTANTALEEHRAAMEHAAREADYLRHASDELKQLAPKDGEETALASRRTTMMQGEKIASDLREAQEAVGGNHSPVAALSAAVRRLERRGINSPALVEPAVKAIDAAINALEEADQHLQAALAATDFDPAELERIEERLFALRAASRKYSTPVDGLAALAAKYAADVVLIDAGASRLKKLEQVAIEADSRYAAAAKKLSLVRQKSAEKLNKAVNAELAPLKLERAKFMTQVETDEAAPGPQGFDRVEFWVQTNPGTKPGPLMKVASGGELSRFLLALKVVLSDRGSAPTLVFDEIDTGVGGAVADAIGGRLARLAGKVQVMAVTHAPQVAARADQHLLISKDALDKGKRVATRVNALAADHRREEIARMLAGAEITAEARAAAERLLKAATA

SEQ ID NO: 15952 - protein, 329 aa, BradyrhizobiumColbertium
MDRRGRMAGTTVTFRAHGGVHGLAGTASQGVKAELMSAQRMTRGYLSVGAGRLVQAAILFMLALPLAGCGTGSLWDKFTAKDDTFVEEPADKIYNEGLYLMNEKKDMKAANKKFEEVDRQHPYSDWARKSLLMSAYASYQGGDYDGCIGAATRYVTLHPGSPDAAYAQYLIAASHYDQIPDISRDQARTEKAIAALEEVVRKYPTSEYATSAKAKIEGARDQLAGKEMNVGRYYAQKRDYTAAINRYKTVVTQYQTTRHVEEALFRLTEAYMAIGIVGEAQTAAAVLGHNFPDSRWYKDAYNLVKSGGLEPSENQGSWISRTFKKMGLG

SEQ ID NO: 15953 - protein, 320 aa, BradyrhizobiumColbertium
MKFNRQTTLRAQASVAGVGVHSGLPVTLTLGPAPVDAGFIFVRTGLEGSDREVQATAEQVIATDFATVLGDRNGPLVSTAEHVLAALRGMGVDNATIEVDGPEVPIMDGSAAAFIAAIDQAGIVTQPAQRRLIQVLKPISVKIGDSFGEIRPHASGFRVEVEIDFSNPVIGQQSYAFDLNPEGFRREVGRARTFGLMCDVARLWSAGYALGASFDNTVVFDDERLLNAEGLRYADECARHKVLDVIGDLSLAGLPLLGAYRSVRGGHKLNHAVLTALLADRTAWRVVEGEAARRTARPVGEVGRGIVGGRIAAAFGPDVS

SEQ ID NO: 15954 - protein, 596 aa, BradyrhizobiumColbertium
MTISINVPDIHELKPRITVFGVGGAGGNAVNNMITAGLQGVDFVVANTDAQALTMSKAQRIVQMGTAVTQGLGAGSQPNVGAAAAEEVIDELRDHLSGANMVFVTAGMGGGTGTGAAPVIAKTARDMGILTVGVVTKPFHFEGGRRMRTAEAGIAELHKVVDTLLIIPNQNLFRVANEKTTFADAFAMADQVLYSGVACITDLMVKEGLINLDFADVRAVMREMGKAMMGTGEASGDKRALTAAEAAIANPLIDDSSMKGAKGLLISITGGKDLTLFEVDEAATRIREEVDQDANIIVGATFDEALDGLIRVSVVATGIEQAAIARNSQATSAPVANPAPQVQQAAAPAAAAESRLADLTARLRADNQRLAERAQKLEAQPPAAAPAPAPGPARPNVERAALAAIAAAVAEVPQNPAPQTYGDVTVRPIAQKPTLFPEPEMAPVAMQEPMTPENFIPPQAERPPVRTPRMPRIEELPMPAQAEIRQARGEVEDETPQKSRLSLLQRLANVGLGRRDEESEPPVAARTAGPAMPPLPERRPQKTVAQQIASNEPVSEYARRPAPQGLDMHGRPAPVAPAPQGDDHLDIPAFLRRQAT

SEQ ID NO: 15955 - protein, 440 aa, BradyrhizobiumColbertium
MTGLDRTQTPKTRPMPHKRGGLVACLDIGTSKIACMIARLKPSPPSDALRGRTHAVELIGYSQIQSRGMKAGAVIDLNECEQAVRQAVGLAEKMAKVRVDSVLLSVSGGRLSGQLVEAAADIRGGAVTPADVSRVTSTGMRHATGEGRTVLHALPVGYTLDGVKGIRDPRGMVAHQFGVDMNVVTCDATVARNLMLAVERCHINVEAMAASPYVAGLSVLTDDEADLGAAVVEMGAGTTTIAVYSGGRFVHAAGFAVGGQHITMDLARGLSATIADAERIKTLYGTVITGGSDSRELMSVPTAGDEQDLPQIVSRATIANIVKHRAEEVFEMVRDKLKDSPFAAEPKGRVVLSGGASQLTGLVELGTQILGRPVRVGRPLGFGRLPNEAKNAAFAVPAGLLVYPQYVHLEHVEPRHTRQQAKTGTGGYFGKVGRWLREGF

SEQ ID NO: 15956 - protein, 342 aa, BradyrhizobiumColbertium
MDGAGSLTRSLFRSLRPQADLKAAAIGAVVLLREWVQDKRAAARTAAEDKAKSRSRAKAVVEREPPPRMVALVERYLPHRVGLSMTVLLLIGSCGFGIVKGGHLQDFTTAVGDARNALANSAGFRITSVVINGRKQLTQDEILAIGGISGRSSLLFLDADAVRDKLKANPWIADATVLKLYPGRLMIELTERKAFALWQEAGRLSVIADDGAVLEPYVSRRFLTLPLVVGKGAETQARDFLALLARYPQVNSITKAAIFVGERRWNLRLKDGLDIRLPEQDVGNALAMLSKLDREDRLFSRDIVAVDMRLPDRLVVQLSEDAAKAREELFKDKKKKKAGDSA

SEQ ID NO: 15957 - protein, 48 aa, BradyrhizobiumColbertium
MPGRVLVFSRRKPLPFKAYAGGDITRDSSRAGSQSAICAASVNLRTSW

SEQ ID NO: 15958 - protein, 330 aa, BradyrhizobiumColbertium
MTMRITILFGGSNRERLVSVASAQALHQALPEADLWWWDVEDKVHVVHSKQLLEHARPFEDEFKPGTSGIPLEQALDRAKSEGRVLVLGLHGGRAENGELQVMCEARGVPFTGSGSASSHLAFDKIAAKRFAALGGVTPPANIALANIDEAFAEYGRLIAKPARDGSSYGLIFVNAKQDLVAVRNAAKHEEYVIEPYIAGVEATCGVLERPDGSIISLPPIEIIPGEGSFDYAAKYLLKSTQEICPGRFAPEITAALKEQAMLAHRAMSCAGYSRSDFIVSNKGLVYLETNTLPGLTKSSLYPKALKAEGIEFVDFLRGLVELAGQRVRK

SEQ ID NO: 15959 - protein, 305 aa, BradyrhizobiumColbertium
MSFPDITPSLKAAMPNLRGRLLANQPLADLTWFRVGGPAQVLFTPADEDDLAYFLAHLAPDIPVHVVGVGSNLIVRDGGIAGVVIRLSPRAFGEASASGDVVTAGAAALDKRVAEVAASANIGGLEFYFGIPGTIGGALRMNAGANGGETKDVLIEARGVGRDGTKHVFSNVDMKFVYRNSGVDPSIIFTSARFRGELRDAEAIRARMAEVQTHRETAQPIREKTGGSTFKNPPGHSAWKLIDAAGCRGLRVGGAQVSEMHCNFLINTGEATAHDIETLGETVRERVKANSGIELQWEIKRIGVS

SEQ ID NO: 15960 - protein, 467 aa, BradyrhizobiumColbertium
MRLPREIGPIHFVGIGGIGMSGIAEVLVNLGYVVQGSDASDNYNLDRLRKKGATVSVGHKAENIGGAEVVVVSSAIKRDNPELVAARQKRIPVVRRAEMLAELMRMKSCVAIAGTHGKTTTTTMVATLLDAGGLDPTVINGGIINAYGSNARLGAGDWMVVEADESDGTFLKLPTDVAIVTNVDPEHLDHFKTFEAVQDAFRHFVENLPFYGFAVMCIDHPVVQSLVGKIEDRRIITYGENPQADARLVDLTAGGGGSKFNVVIRDRKSGAVHEIADLALPMPGRHNASNATAAIAVAHELGVSDDAIRKALAGFGGVKRRFTKTGEWNGVTIIDDYGHHPVEIAAVLKAARDSYTGKVIAVVQPHRYTRLQSLFEEFCTCFSDADAVVVAEVYAAGEAPIEGIDRDHFVAGLHAHGHREVIPLPAASELAGIVKGLAKPGDLVVCLGAGNITQWAYALPGELKALG

SEQ ID NO: 15961 - protein, 276 aa, BradyrhizobiumColbertium
MAGLLIHSLSEFSDLILEALALADAREIVEIGSEYGGMSPFLAEHCRARGGRLTTIDPSPKREFMEWLKISPDVRHLAKASLEALVDVDEADAWVVDGDHNWYTVYNELGHIDAISRRAGRPLLVFLHDIGWPWARRDLYYAPEKIPGEYRHAHSFEAGVVLGQDRLVDGRGFRGMGQFAIAKVSGGPRNGVMTAIDDFLAEALRDGREFGFAEIPAVFGLGVIFDLDAPWSAALADLLLPYHQNRLVSALEANRLRNYLRVLEFQDEAAARIGAI

SEQ ID NO: 15962 - protein, 366 aa, BradyrhizobiumColbertium
MDTSPLILLAAGGTGGHLFPAEALGVELIRRGFHVRLVTDERALRYSGLFSKDMIDVVRSETARGRNPFQLAFAGLTLAAGTLSAYALIKRLKPVAVVGFGGYPTLPPLVAAKFAGVPSIIHDANAVLGRANRFLSSHVRAIATSLPGVLDRDPALSAKTTMVGTPMRPAILAAAAVPYVAPEANGPLRLLVVGGSQGARIMADIVPGAIERLEPALWSRLVLTQQVREEDMSRVRAVYDKLKIKAELAPFFTDLPARLASNHLVVSRSGAGTVAELAAIGRPSILVPLPGSIDQDQFANAGVLAKVDGAIRIPQTEFTSDRLASEISAFAAEPARLAAMAAAAKGAGRLDAAERLADLVVKTAGI

SEQ ID NO: 15963 - protein, 383 aa, BradyrhizobiumColbertium
MLSREERTPFSEWWWTVDKPLMGAILGLMLTGVILSLAASPPVATRIGLDPFHFFSRHVLFLVPSCIVLLGVSFLSPRAIRRSALIIFAASIVLIVLTLAIGPEVKGSRRWITLLGVNIQASEIAKPSFVVIAAWLFAESTRRPEMPATSMAVVLLLMLVALLVMEPDFGQTMLVLMVWGSLFFIAGMRMIWVFGLAGLGAAGLFSAYLFVPHVAGRIRRFMNPASGDTFQVDTAMEAFYNGGWFGLGPGEGVAKRSLPDSHTDFVFAVAAEEFGIILCLAMLALFAFVVMRTLSRAYANEDMFSRFAASGLAILFGVQAAINMSVNLQLIPAKGMTLPFISYGGSSMVSLAYGVGMMLALTRQRPRTEVEASGHAEAMRSYA

SEQ ID NO: 15964 - protein, 466 aa, BradyrhizobiumColbertium
MIPVTSFAGKTVAVFGLGGSGMASCHALKAGGAEVIAADDNAENIAKAVQAGFITADLRSVSWANFAALVLAPGVPLTHPVPHWSVLKAREAGCEVIGDIELFCRERRRHAPDAPFVAITGTNGKSTTTALIAHLTKVAGYDTQMGGNIGTAILSLEPPRMGRVHVIEMSSYQIDLTPSLDPSVGILLNVSEDHIDRHGTIEHYAAVKERLVAGVKAGGTAIVGVDDGFCRDIADRLDRAGKNVVRISVKNPLASGIYVEHGNIVLASGGASSEVAALGGIGSLRGLHNAQNAACAAAAALAMGISLDVLQGGLRSFPGLAHRMEQVGRRGNVLFVNDSKGTNADATAHALSSFADIFWIAGGKPKAGGITTLTGFFPRIRKAYLIGEAAQEFSGTLGSEVPHEISQTLDVAVEHAARDAEAAGLTDAVVLLSPACASFDQYRNFEIRGTKFRELVQALPGVKPVV

SEQ ID NO: 15965 - protein, 39 aa, BradyrhizobiumColbertium
MKIVAAQDRHSGRREGAIGNPEVPGSRCARPGTTEVNSS

SEQ ID NO: 15966 - protein, 367 aa, BradyrhizobiumColbertium
MFYWLIELSNTFPGFGAVRTFLNVFRYITFRTGGAVVTGALFVFLFGPWIIDHLRIRQGKGQPIRTDGPQSHLAKKGTPTMGGLMILSGLTVGTVLWANPLNPYVWIVLAVTLGFGFVGFYDDYLKVTKQTTTGFGSKLRLLIEAVIALVACYALVRLNRDPASTALTIPFLKDTVLHFGWFFVVFGAFVIVGAGNAVNLTDGLDGLAIVPVMIATASFAMIAYLAGNAVFADYLQIKYVAGTGELAVLCGALLGAGLGFLWFNAPPASIFMGDTGSLALGGMLGAIAVAVKHEIVLAVIGGLFVLEAVSVIVQVVSFKLTGKRIFRMAPIHHHFEQLGWTEPQIVIRFWIISVMLALAGLSTLKLR

SEQ ID NO: 15967 - protein, 460 aa, BradyrhizobiumColbertium
MSAPIWTIAEVARALGATGSFPDVPIDFVTQDSRLVKPGSLFVALSGTPSGGFVSAFASARDGWEFADKAEAAGAVAMIVPHEIPGIRVPQIVVEDTLIDGLWRLARAARARFKGPVIGLTGSAGKTSTKEFLAAYPNAYASPSSFNNFWGVPLTLCNARRDASLWVVEMGMNQQGEIARLSELTQPTVALVVNVQPVHLEKLGSLEAIRREKVSISLGLPENGVLVLPAGLKAPEWKGKVVRFGGEHAEVHEVAHAPHGESWQVVAAIGKKEIAFSLTPGAPHRVHNALAALAAVHAAHLDVATLAIKLDRVGIMTGRGVEQTVGDITVIDDSFNGNPASVAAALQSLQARHMGEGRRVAVLGDMLELGEDAPSYHTGLAKYLDGIDAVYCVGALMRHLYDVLPAGKGLGWHDDPATLKPSEVASLLKAGDVVVVKGSKKMFWVNKFVPGLVAALQAKA

SEQ ID NO: 15968 - protein, 490 aa, BradyrhizobiumColbertium
MKLRDLLGQDVLGHDAAIEPAVAGLEVGGLALDSRVVKPGDLFFALAGSKTDGARFIDAAIAAGAIAIVGDHAPAATKVPFIAAANPRRALALAAARFFPAQPATIAAVTGTSGKTSVAAFTRQIWERLGHASASIGTIGLVSSKRTVYGSLTTPDPIGLHRQIDEIAREGVTHLAFEASSHGLDQYRLDGVRVSAGGFTNLSRDHMDYHPTVAHYLAAKLRLFRELVPPGGAAVISADHDCSTEAIEAAKARGLRVMAVGRNGDAAGEGIRLTEAVVEGFSQELTLEHRGKRFAVRLPLVGEFQIENALVSAGLAIGTGSDAANVFACLEHLEGAKGRLERVGERNGAPIFVDYAHKPDALAKALQALRPYAKRRLVVVFGAGGDRDAGKRPIMGEIAAENADGVIITDDNPRSEKPEAIRAAILATAKGAREIGDRTAAIRAAIEDLQEGDALLIAGKGHETGQIVGTEVLPFSDHEAVAAALASRVA

SEQ ID NO: 15969 - protein, 584 aa, BradyrhizobiumColbertium
MSPATPARSTEKSNEPWRQRLIRSVLYGRNVDRTAKARARVGLAMVAFASIYALIGGRLVMFAIGADAHGARRAAAQEVVATARPDIVDRNGAILATDVKAASLFGEPRRIIDKDEAIELLTATIPDLDEAEVRERLKTRKGFVWLKREVTPAQQQAVHKLGIPGIGFLRENKRVYPTGNEVAHLIGLVNIDNQGIAGLEKWLDNQGLADLHRAGFATDRLQKPIELSVDLRVEHALRDELLKAKDKFHAKAASGLVSNVKTGEIVAMVSLPDFDPNNPKEAHDPDRINRLTTGVYEMGSTFKAFTLAMGLDSGKINLNSMWDARGNLHYGKFTIHDSHPLGRFINTKEVFTYSSNIGAARIALNQGVEAHKAFLAKMGQTTRLRTELPESAAPLLPRRWSELNTVTAAFGQGLSVAPLQAVMGINALVNGGYLIPPTFLKRSEAEAMAMAKRVIKPDTSDKMRFLMRLNAEVGSARKADVKGYYVGGKTGTSEKVVNGRYAKKRVLNSFPAVLPCDDPKYHVLIMLDEPQALPETHGFITSGWNAVPTGGKVIERIAPLLGIEPRFELPPAERLILAASRTTQ

SEQ ID NO: 15970 - protein, 130 aa, BradyrhizobiumColbertium
MRIIHLLVIGALIFAAAHVYRIKMDSTARTEKVLRLRAEIREERDAIAALRAEWAKLDAPHRLQGLSDRHLHLKPVNGTQYDSLKNLPERPLRMFRPGEPDPIGAMLNAIEAASDPDTVTGSVPQPEDRQ

SEQ ID NO: 15971 - protein, 329 aa, BradyrhizobiumColbertium
MSSTPHVPVLGREAVAYLAPREGGVYVDATFGAGGYSRAILDVPGTRLIAIDRDRTAIAGGAELVKSSAGRLTLVEDRFSHLADVCASLGFETIDGVVMDVGVSSMQLDQAGRGFSFRLDGPLDMRMGQTGPTAADVVARASESDLADIIYLFGEERHSRRIARAIVADRQETPFTTTRALADLVGRVVRSKPGDIHPATRTFQALRIFVNEELEELQTALAAAERVLKPGGRLVVVSFHSLEDRIVKNFLGERSKTGGGSRHLPEVAQIAPSFQLLTRRPVVAGEDEVAQNPRARSAKLRAAERTSAPAHATDGASSWPKLSDVMRGG

SEQ ID NO: 15972 - protein, 92 aa, BradyrhizobiumColbertium
MRSRAHARDLRIAKPDTQARSAWNKPITPRMIARRGGSTTNPLSSMVTEPDRPGPQTQCSQQNLSGSHGISSQIRFGRLRTRVGSSSLSNGP

SEQ ID NO: 15973 - protein, 263 aa, BradyrhizobiumColbertium
MANVRTFEPDSSIVSDIIPSPNYGERNKGRQPDMIVLHYTGMPDVEGALARLCTAGTEVSAHYVVLEDGRIVQCVPEAKRAWHAGVSSWAGEDDINSCSIGVEIINRGHDWGYPEFPLRQIAAVIALCRGIMLRRKVPAHRVLGHSDVAPARKKDPGEKFPWHSLANSGVGHWVTPAPIVRGETLMLGTISDAVLSLQQALARYGYGVPLNGKYDAATMEVVTAFQRHFRPARLDGVADHSTLSTLQALLASLPQDATSVASK

SEQ ID NO: 15974 - protein, 237 aa, BradyrhizobiumColbertium
MAARAKTFLLCHGAWSGGWAWKKMHPLVAQAGHRLVAPTYTGLGERAHLASPAIDLDTHIQDILNVIAFEDLSDIVLLGHSYGGMVATGVADRMRERVTQLIYLDAFVPRDGQSLFDLNESGREPMRKAVADGDGYRIAPNPPPRDTPQADLDWLNARRVPMPIKCFEARLRLEHGEPAMPRSYIYCTRIPPGDVFGQFARRTKNEHGWRYFELDASHAPNVTAPQALMAVLEKIVA

SEQ ID NO: 15975 - protein, 117 aa, BradyrhizobiumColbertium
MFGRFLKVAHACDHCGEELFHQRADDFPAYLVMVVVGHLVVPGILAVETAYAPPEWLQLAVWLPVTLIASLALLQPTKGAIVGLQWQLGMHGFEAGKLRREGGELAPVLVKADTRAA

SEQ ID NO: 15976 - protein, 461 aa, BradyrhizobiumColbertium
MGLICMGWIPTISELSGPRYQRIVEAMEADIAAGRLVRGQQLPTQRALAKALGIDLTTVTRAYTEARRRGIMEARVGQGSFVSETSARRSVDLPHPVSIDLSMNVPPHPLEAQLDERITAGMEAIRAQSGLTAYLNYQPPGGSLHEREVAARWLRTRVPHAQADRLVIFPGAQTILFSLLAQLARPGETVLTEALTFPGVKAAAARLGIKLVGVAMDEAGILPDALAKACRTHRPKAVYLIPTLHNPTTATLSDERRGAIARIVRDTGTILIEDDAYGLLDRSASPIASLIPERTYLATTLSKCIAPALRVAYLLTPDSGAQRDMRMSLQATVQMPAPLMVALVTHWIESGIADRIISAIRSEAIGRQQLAQRTLKGFQLLAKPAAHHLWLRLPEGRLDIAADLLRNGLAVVAGDAFTVDGAPPHAARVSLGAARNRSELTEALRILIGALQKPADTRQIV

SEQ ID NO: 15977 - protein, 87 aa, BradyrhizobiumColbertium
MTLTRIAAAAALLAVALAPTLALAQFSEPAAYQAAHPDRDVLNGGQLTPAARAALGQRGMPADAYASQAHPSSMTPEVRSGHRRHRR

SEQ ID NO: 15978 - protein, 247 aa, BradyrhizobiumColbertium
METLTYILLLFGALAGGFVSGLAGFGTALMALGIWLYVLPPSLAVPLVLICSVIAQTSTLPSMWKSFDLSLVWPFLIGGLIGVPLGTMMVASADPKVFKLSVGVLLLLFSSALYLNKRPLAFKFGGRIADGAIGFAGGILGGLAGLSGPLPILWANIRGWNKHERRGIFQLFNFTVLATALVLQTASGLVELKVVWLALVAFPGTLIGTWTGARVYHALSDKHFGDVVLGLLFLSGLGLVWNSLGTQ

SEQ ID NO: 15979 - protein, 599 aa, BradyrhizobiumColbertium
MTALSKKPAAIRVVLPFVFRHWLKQPGRGLVVAGGLLGATIADLFMPVFSGHLVDALTRGPSDPDARHAALVAFGAIVALGAASMVLRLVGLQAIVPFTLKIMSDVAQDAFTRVQRFSTDWHANSFAGSTVRKITRGMWALDLLNDTILMALAPSLLVLVGSMILVGMHWTSLGVVIAVGAIVYVAITVVFSTRYIAPAARVSNAWDTKVGGTLADALTCNAVVKSFGAELREDTRLARVINRWRVRVRRTWYRYNYTAMAQLSLLLCLRASVIGGSVLLWMSGHASPGDVTYVLTSYYVIHAYLRDVGMHINNLQRSVNDMDELVAIHDEPIGIADAPDARPISIEGGEIAFDDVTFHYGGHRAPLYDGLSLTIRAGERVGLVGRSGSGKTTFVKLVQRLYDVTGGRVLIDGQDIALATQQSLRSQIAIVQQEPILFHRSLAENIAYGRPGASLEAIEQAARLANAHDFILRLPKGYGTLVGERGVKLSGGERQRVALARAFLADAPVLILDEATSSLDSESEALIQEAMERLMNGRTSIVIAHRLSTVKSLDRILVFDRGEIVEQGTHAMLAARPGGIYRGLFERQVVELGRIAAAE

SEQ ID NO: 15980 - protein, 528 aa, BradyrhizobiumColbertium
MADAATASSAVIAHPASDRIAPKRLFAFIIMVFGMFMSILDIQIVSASLSEIQAGLSASSSEVSWVQTAYLIAEVIAIPLSGFLSRAFGTRLLFAISAAGFTAASLLCGLATTIEEMILWRALQGFLGAGMIPTVFASAYTVFPRTKFHIVGPIIGLVATLAPTIGPTVGGYITDLMSWNWLFFINVVPGIGITIGVLALVDFDEPHFELLDRFDWWGLLFMAGFLGTLEYVLEEGPQYEWMQDTSVAICAWICGLSAVAFFWRVFTAAEPIVNLRTFSDRNFAVGCTLQFCIGIGLYGLTYIYPRYLAEVRGYSALMIGETMFVSGITMFLVAPLVGRLMAKVDMRYMIAFGLIVFAIGSYQMTWMTRDYDFYELLVPQILRGIGMMFAMVPTNNVALGTLPPEKVKNASGLFNLMRNLGGAVGLAVINTVLNDRTDLHIARLQERVTWGNATATETLTMFMQKFQGLGDSALMAMKQLSQIVHRQAVVMSFGDAFLILAVFYLGLSLLVALLDRPASPFGAGGDAH

SEQ ID NO: 15981 - protein, 380 aa, BradyrhizobiumColbertium
MTDKPAASAPDAPAAGAPRSGKRKFVLMGVGLLLALAVAGYAGYYTLVGRFYISTDDAYVRANNTMLGARVSGHIASILPGDNTSVRAGDIVFRIDDGDYKIAVEAAASKIATQQATIDRIGRQVAALDSQVAQAKAQLVSAQAGLKRADLDYERQQALSSKGFASRATFESSEAGRDQGAAAVKAAQAAYDVAVSNVDVAKAQQAEAQAQLAELKTTLAKAERDLGFTAVRAPVNGTFSNRLVNTGDFVAVGQRLGNIVPLDDVYIDANFKETQLKRIRPGQPVTIKVDAYGMRKFSGVVDSIAAGAGSVFTLLPPDNATGNFTKIVQRVPVRIRVPKSVAKQNLLRAGMSVYAIVDTNKGAADADSEVDLDDPTVHPQ

SEQ ID NO: 15982 - protein, 81 aa, BradyrhizobiumColbertium
MSAQLLGRGCGCLRRDITARLLLRHFLAKDARRLVSRYGHNGLPQNIRNRGRPCLRPVPRSFQISLTERFGQYTYQTRTGP

SEQ ID NO: 15983 - protein, 211 aa, BradyrhizobiumColbertium
MVVASDEHLHVVQDEDNSKRRQILDGARKVFMDLGFDGASMGEIARAAQVSKGTLYVYFADKSALFEAILEQEALRHGQVVFNFDPARDAETTLKEFGLAYLQLVCRPGGGSAIRTVMAIAERMPDVGRRYYARVLDKSINRLSGYLKARVAAGELEIGECDLAASQFMELSKASLFLPFVFQAAPAPSEQRMTEVVESATRMFLAAYRAR

SEQ ID NO: 15984 - protein, 113 aa, BradyrhizobiumColbertium
MSRDLRPPVDILHYEIVQEQASALGRMGRTLEQALTRLREFDAVHAATELPPSMQSARRKLVVEAGQALWMFVVQREASGLRDSRHIMRTYNVPSEVQRCMGLAPTPSKPAST

SEQ ID NO: 15985 - protein, 215 aa, BradyrhizobiumColbertium
MLNTLDKPDLDLVMRTGRLASYRNRQYLLREGEPASGIHIILSGIVESTHSGTQGRELMLSTWEAGDFVGAPYILGDHRHSWSARALGRVEALHLDQDAIRRLIAQSPSFAVALIECLGFKGETYSMLAQTLAGQKAAERLVLLLVKMCENAAQDESGPISLGRITQANLARMIGATRQSISLILNRLQDDGIISTGPTKMVVNDLAALRKQITD

SEQ ID NO: 15986 - protein, 451 aa, BradyrhizobiumColbertium
MDVSPGSLRAAYRSGALKPSDVAAHVLSRLSGADQSGVWISTAHPDNVMTAARALDARIDEIDRLPLYGLIFSVKDCIDVAGEQTTSACPEFAYLAKDTSPVVADAIAAGAIYVGKTNMDQFATGLVGVRSPYGIARNPHNPDYIPGGSSSGAAVSVATGTSSFAFGTDTGGSGRVPASYCGVTGFKPAPGAFSQRGMVYACRSFDTISLYTREPRDGYEIYRVLARRDADDCFSPLDFPGWAEQRPPARRFRIAMPRLDQLRFFGNPETESLFGDGLRRLRQIDMPAAPVDFSPFTSINDLMFFGPFLAERDVSVGAFLDANPGVGVKIVRDLVLGSRTLSAADAYRALYKVKEVQHALRDFWQDHDALIVPTVGTVLSIDDVARDPLTANFNNGYYTNYANPLGLAAVAVPHAVTGAGVPYGVTFLAPAGRERLLTDLACAFMGAAAQA

SEQ ID NO: 15987 - protein, 335 aa, BradyrhizobiumColbertium
MKRLVAALALATLPFTATARAEDKPPKVTVGYLNLVNAQLVTKHLGLLAKEMPGVDIKYVKVGGGGDMLRAIAGNDVDFGGLGNPPTAIGATRGLPIKGILVINMLDYVESMVVRADKNITSLKDLKGKTVAAPFGSTTHYLLLQALKNEGVDPASMKIIDLAPSDIAAAWLRGDIDAAWFWEPNLDKAVKNGGKILVTSGDMARRGYPTWDIGVVMNAFAEKYPSYVEKFVKAECDGIDFWLKNPEKTAEIIAEELSLPLEDATRMMKGTGMVPCDKQLTEQYLGTSAKKGEFVDTLVATADFLVKQERLPKLLPRAGFEAFIQPAYLEKVIGR

SEQ ID NO: 15988 - protein, 279 aa, BradyrhizobiumColbertium
MSVEAAPMAMPISADRTRRGSLRMPNVSRSVLLSTLTVAVLLTTWIIVTEIRWANELFLPKPQAVWAAFVKTMTKGYQGTTLLQHLGASLYRILVAFALACLVGIPLGVLMGVSRNARGLLNPLIEFYRPLPPLGLYTLLVMWLGIGESSKLSLLFLAGLPGIVISTIQAVTSVDPVYVRAAQSLGATRRHLLFHVYLPAAGPLILAGMRISLGFTYTVLVAAEIVAASAGIGWMIWDAAKFLLSDVVIMGLIVLGLTGVVLDLMMRAIAKLLMPWART

SEQ ID NO: 15989 - protein, 432 aa, BradyrhizobiumColbertium
MQMPVTPPYSDLEQRVLSRITEERWLELASELIRTGQPRSGNPLDPDLPPAEEEAISMLVAGKLEALGMVVTKHSAQPHRPNVLGVLKGREGAPSLILNDHLDTYPVVEPEKWHMTDFDPFKATRHGDRLYARGTSDTRGNLAASLLAVQALIEEGVKFDGTLMCCYTVDEERNGTEGSIYMLEKVGLTADYEITAEPTAWGDVGKDWGMNLSVANSGHCLVEVTVRGIKSHIWRPDISVNAIMEAGKLLPRLKEMAFTHVPSKFMGHTPPCCSVVRIRGGLPGEMQFSPDACTITLAVVGIVPGMTLGSVISDIERLGQQTFAGVNDVEVEVRQVPGSLFVNATEPVPVEEEPCRSLRAVYRRLMGREPGVNRKNAFNDTIRFREAGINAVTFGPGEDGWAVDNENISVTKSVMATRIYALTIMQILGVRA

SEQ ID NO: 15990 - protein, 37 aa, BradyrhizobiumColbertium
MPWMKIATVQIFARQPRFAKDTAPAEQTSRIRAVGLR

SEQ ID NO: 15991 - protein, 395 aa, BradyrhizobiumColbertium
MYLVGSIVLVSLAGCGRGFFQAEREPWRAEAEAACLKSGAVKESADIVRIEPISGPGQCGAEFPLKVAAIGETSGTYGFADEQLRPPGNIGSQPRWPVAQPRSNYPQSQNYPASSYPPRPNYPDSEVRQPSGYGGSTGPISLNAPGVAPQEDEIDLPPEGIDAAGASRYMNAPSYPARPAPYSQAPAQQPLPRLGPAQGNPVTAVGPVAIKPTATLACPIVSELDRWLADTVQPSAMRWFGVRVAEIKQISAYSCRGMNGNSRAHISEHAFGNALDISAFVLADGRRVTVKDGWRGVPEEQGFLRDVQAGACAHFTTVLAPGSNVFHYDHIHVDLMRRPSRRLICQPAAVSGEQVAARAQSRSPYANAREPSVTGSLGARKSTARKREDDDYIDE

SEQ ID NO: 15992 - protein, 41 aa, BradyrhizobiumColbertium
MTAAAKRATSGSDLMTFTGRLSVITAYFAIAFVGAIVLGMI

SEQ ID NO: 15993 - protein, 129 aa, BradyrhizobiumColbertium
MHTATVAPPIEDRAYTPLGEWESAGANGTVRIERCGPALCGYALTDSLRRGESVLVNMKPKKHDVWTGSIYSRASGNTYRATMTLKGSGKLHVEACALGRFWCSGNDWTRVDAPREQMITTSRQWSARS

SEQ ID NO: 15994 - protein, 127 aa, BradyrhizobiumColbertium
MTGGSLRSSSIRGGLELSASDLGVVSSFGVSNLEAADGTTDCDAVAARAGGAGGDGTTSLACGGPTGTVGQAGCGAWTTGAGACGKARAGPASSVGRKLRFDTVTQDADRQWRGASTWNRWPPIEKV

SEQ ID NO: 15995 - protein, 259 aa, BradyrhizobiumColbertium
MNRLTIAAAALFLASTAAAHAGNSISFQIEGQRIRIETPRNCASLDCVTIVAPGLSDKPIKLNNINLKGLGGSKDDDVDTTPAPAPTTAQPAPAPVQQQPVQSTAPAAPAVTTPAAPAGAVAAAPPAAVVNTQPAPVAAPAPVAAPAPVAAAPAPAPVAAAPVAAANSPVGLWATEENKGNVRVEQCGPNLCGYAEKTNERILINMRPAGSKWSGRIRDPNSGRNYDSTISMKGPNAMRVQGCAFGGMFCGGQTWKRVS

SEQ ID NO: 15996 - protein, 186 aa, BradyrhizobiumColbertium
MARAPVMAAGGIVLRRGPQPLIAIVRQRKRNEWVLPKGKLDDGETPKEAAHREVLEETGHDVAVHEFLGTLAYQSGGRSKVVHFWRMEAGDGPVRKLMNDIKAVDWLGLDDAIARLSREYERAFLYQVGPIALAAAGLASPLPDAAQAADDIGTALQTLTPAEVASVDQLRHGLLQKVKAWLRGEA

SEQ ID NO: 15997 - protein, 287 aa, BradyrhizobiumColbertium
MTVKALIASFTQQEDLNFLLTNRIPRAALTRFMGWFSKIENPLVRDFSIALWKLFSDLDLSEARKTHFRSLHDCFTRELKPGLRPFDPDPAVVASPSDGIVGAHGRIADAELFQVKGAPYSLLDLLGDSALVDQHRNGSFVTLRLTSSMYHRFHAPYDAHIERVTLIHGDVWNVNPIALKRVERLFCKNERAVIRTRLSTGEAVTLVPVAAILVASIRLHFLDVVLNAQTRGPVNFPCDVNVTKGEELGWFEHGSTIIILAPGDFAFCDGIAEGTRIRAGQALLRRK

SEQ ID NO: 15998 - protein, 545 aa, BradyrhizobiumColbertium
MSVAAAASAAAVLPKLKARVELSRAKHRSLAGHSKMSRRVARLLPFYEFADADYFSCDGAPANIAAQRKDGFFRLAALYAERYPKGRAMTRDAAEKISDLNFTESYRVPFQFSRLVREHLGTSTFVESSSGVTVTDVDGNSFYDLTGSYGVNIFGNDFYKECIEGAEKRAHALGPVLGPYHPVILDNVSRLCRISGLDEVSFHMSGTEAVMQAVRLARYHTRRTHLVRFAGAYHGWWGDVQPGVGNPIPAHETYTLAEMSEKTLHVLRTRKDIACVLVNPLQGLHPNANAPGDSSLVDSSRGGHFDRAAYTEWLKKLREVCTERGIVLIFDEVFVGFRLAAGGAQDYFGVRADIVTYGKSLAGGLPVGVVCGKRELMRRFRDDRPADICFARGTFNSHPYVMTAMDEFLSRLASPNFRAVYDRLDETWNGRVQKLNRMMESAGLPVRFANLSSIWTVKYTTPSRYNWMLQYYLRAEGLALSWVGTGRLIFSLNYTDADFNEVAERFVRAAEKMKADGFWWHDGVLTNKNIKRQILKEMLAKRFGR

SEQ ID NO: 15999 - protein, 219 aa, BradyrhizobiumColbertium
MIKNYLEQLRIQRWDDHRYYHHSRINQSLHFISALSFLFAYVWLFIDPVVSALVGWLVSMTSRQAGHFFFEPHTYDHVNQATHEYKEEIKVGYNLQRKVVLMAIWALSPLVLVVDPTLFGLFTPWASATDFMRQVAKIWLVVGGGGLLFRTVHLFFIRDVETGLVWMTKILTDPFHDLMLYHKAPLALLRGELMDPGLHLNPEHTLGLAGEPVLEEQHA

SEQ ID NO: 16000 - protein, 229 aa, BradyrhizobiumColbertium
MAKIMNLDGTQQLDLTRGTVEQAYDRWAPVYDLVFGGVFAKGRQAAIAATNKIGGRVLEVGVGTGISLPLYAQNLRIFGTDISEAMLDKARRRVKEQKLKNVEGLAVMDAEKLEFPDNSFDVVMAQYVVTAVPNPEKALDEFARVLRPGGELIILTRVSADTGMRRFIEQKLQPVVRPLGFRTAEFAWSRYAKWLAGAKGIELAERRLIPPLGHFSLVRFRKIDVAKAA

SEQ ID NO: 16001 - protein, 350 aa, BradyrhizobiumColbertium
MRVLIATDAWHPQVNGVVRTLTSLANAAKGLDVEIDFLTPDGFPSWPLPTYPGLRFALPGGKEIARRIEKAAPDALHIATEGPIGWAARAYCRRNRLAFTTSYTTRFPEYVAVRTGIPAAVGYAVLRHFHDAAAMTMVATPSLRQELSERGFKRLGFWTRGVDTELFHPDAPAQLDLPRPIFMTMGRVAVEKNLEAFLSLDLPGTKVVVGDGPQKAALEKKHPDAVFLGEKKGADLTAHLAAADVFVFPSLTDTFGVVQLEALACGTPVAAFPVTGPKDVIADHPIGAIDHDLRAACLRALTMSRETCRNFALERSWENSARQFVGNLTSLQPSRALRASPRMARRPVRG

SEQ ID NO: 16002 - protein, 238 aa, BradyrhizobiumColbertium
MFNLDTFKTYSRAVALGAATISAIAFAGAANAAPMQIFPFFQPLPQLAAPQPFEPYQPNQATPYQAAPSEDQDAVELPARFRRQTVAYATREAPGTIIIDTPNTYLYYVLGNGQALRYGIGVGREGFTWSGIQSVSRKAEWPAWTPPPEMIARQPYLPRHMAGGPGNPLGARAMYLGGTIYRIHGTNAPETIGKRVSSGCIRMTNEDVTDLYSRVNVGTKVIVLPMTERRADLGTATR

SEQ ID NO: 16003 - protein, 143 aa, BradyrhizobiumColbertium
MEAQMQSCLQSSPNPWLHVLVGAGALMLLLSAPSSLAQQSANEDAGKQAFNNSCRTCHSIREGDNRLGPNLNKIVGRKAGSLPDYNYSSSMKEAGFVWDQDRLTRFMVKPDEVVSGHKMQPYGGISADEAAKVVAYLQEAGSQ

SEQ ID NO: 16004 - protein, 90 aa, BradyrhizobiumColbertium
MTGSVSAAAGTGHDGMRAARHLARWLGLAATPTFAIMAASTAVLGDGAADMLCAGQGSVLGGMVPMYLLMSAFHSGAWLKLIAERRLRPS

SEQ ID NO: 16005 - protein, 249 aa, BradyrhizobiumColbertium
MQTPPVVSPQDWEAARLKLLVKEKAHTRARDALAAERRRMPWMAVDKTYAFEGPGGKLSLLDLFQRRRQLIVYRAFFEPGVFGWPDHACRGCSMVADQVAHVAHLNARDTTLVFASRAPQAEITRLKQRMGWTMPWVTITDNFDADFGVGEWHGTNVFYRDGTRIFRTYFVKSRGDEQMGGTWNYLDITPLGRQEVWEDSPKGYPQTPTYKWWNWHDSYTKGAAPDKRWVEISDAGEKAFREEAAGERK

SEQ ID NO: 16006 - protein, 406 aa, BradyrhizobiumColbertium
MESLITAAARALEAGDPLGALNRVALRNDAPSLALRGIAMAQLGDLARAKALLRSAARAFGPREAVARARCVVAEAEIALVSRDLSWPVTALRAARATLEMHGDLANAAHAGHVEARRLLLVGRLDEAERTLAEIRPTPLPPASQVTRELVVAGIAIRRLRTKEARTALSRAAHAARMARIPALAAEVDGAKLILDAPAARLICRGSEHTLLLGEVERLTTSAALLVDTFHHVVRRQGVVVSLGTRPVLFALARLLAQAWPADVSREMLISGAFRARHADESHRARLRVEIGRLRTKLKPLADISATREGFVLAPRKTRDVLVLARPVEEKHAAVLAFLADGEPWSSSALALALGISPRTVQRALEELARSGKVQSFGHGRARRWMTPPVPGFPTGLLLPGPFLKT

SEQ ID NO: 16007 - protein, 212 aa, BradyrhizobiumColbertium
MKRSAAEIITEYGPFPGVETVHGVTYDGRHVWFASGDKLNAVDPADGSIARSIDVAAHAGTAFDGRHLFQIAEDRIQKIDAASGRVLGTIPAPGGGGDSGLAWAEGSLWVGQYRERKIHQVDPETGEVLRTIESKRFVTGVTWVDGELWHGTWENEQSDLRRIDPETGKVMEQLDLPAGTVVSGLESDGGDRFFCGGGDRGNVRAIRRPKRS

SEQ ID NO: 16008 - protein, 529 aa, BradyrhizobiumColbertium
MGRLGGLMRPTLNLKTILVGVAVLAASFFISLKAMDLLSPRATNSAPPVAQLPPLPPASKSSIVIAPVAIALSAIREQAEKAAPRNFAGKADNPISQILENADIGWSAVRGPMATSGDKDVLTISTPLTGRLNVTGSLSSKATGALGDALGSVLGGDAAKRIGAVNIKNLNANAEIKGNVVVTSRPKLAAAWHLEPNLGAQVNLGDTNLNVAGARVNVPAQVKPLIDKTVGEQINAVSERIRNDPSLRDNARAQWVKACRSIPLQGSGSSAALPPLWLEMKPVRAIAAQPRVDAQAVTLLLGLEAETRVTSTPTKPDCPFPDKISIVPPTGTGVNIGVPIDVPFTEINKLIAAQMVGRTYPEDGSGPVDVTVRSANVTPSGDRLLISLLVQAKEKKSWLGLGAEATVHIWGRPVLDQARQTLRLTDIELAVESEAAFGLLGAAARAVVPQMQQALLQRATLDLKPIAANAREKIAAVIADYQKIEDGLRVEAKIDSLTLADIAFDSKTLRVVAEAGGTLNVFVTKLSGM

SEQ ID NO: 16009 - protein, 182 aa, BradyrhizobiumColbertium
MMKSIVAGLAGTALLTTVAFAQSPTATGDKAAPSATAPTTSTSTTASTTASGQWRTSKMDGLKVYNEANENIGTINDLLMDKNGDIKIAVIGVGGFLGLGEHLVAVPYEKLKFVNEPVASTTANMGTKPAGTAGTTTGAATGTDRPAATATTSSTSKWYPDHAVFNASKDELKNMPEFKFSE

SEQ ID NO: 16010 - protein, 189 aa, BradyrhizobiumColbertium
MTSISAASAGSYQSPLQRLQQELQSQVSAGTISSTDQSALSTALTDIDTALQQSRSSGQSSGTRPSKEAMQSKIDDLISNEVSNGTLTSDQAEELKSVFQSAFASGPASAGGPGGAGGPPPGPPPDDSSSDSATTDSTSSSSTEQTTAEILQQFLQALQQSQSSASSYGANGNSSSSSNFSALLIDFTS

SEQ ID NO: 16011 - protein, 246 aa, BradyrhizobiumColbertium
MAISNPNILVVEDDRETRTLIAKYLRNNACNVTAVSDGREMSRAMTDHRVDLIILDVMLPGEDGLSLCRKVRAESQTPIIMLTARGEDVDRIVGLEMGADDYLPKPFNPRELLARINAVLRRQAAAQAASAIEGASTLAFDGWRIDLRLRELRNPEGARVAVTSAEFDLLRTFCERPGRVLSRDSLLDLTQGRNTGAFERSIDVLVSRIRRKIEPNPADPTMIKTVRSGGYLFTPRTEAVTVSLSS

SEQ ID NO: 16012 - protein, 443 aa, BradyrhizobiumColbertium
MPTMKPFGFFHLKGIGGQIAALVLASTVALHLVVTTAFLINRSDRHDAPPDGAHQLADAALLLGAAEPGERPRLLADLARAFPRLGIEMLAPGTATVETSDSPHLHGMRRHLGPGFKAMQLAPNGTPERVGVELPDGTMIVARVDGGPRPWFWGAPWLMALMTAFICVTVLGLWAARALTRPLSSFAEAAENFSLDGTAEPLPERGPEEIRSVARALNRMHERIARLMSDRTRMLAAISHDLRTPITRLRLRAEFIEDEGNRKRMLVDLDQMRAMLESVLSLLRNDRKIEAVTLVDIASTLQLIADQFGDMGHVVRYEGPASATAAARPDDLHRGITNLVENAARFGAEVTIRLAVSDTALVVDVEDDGPGISDARKQEMLEPFVRGDDARTMDDSTGFGLGLSIARAIALAHGGELSLHDRKPHGLIVRMQLPRSQATRLAA

SEQ ID NO: 16013 - protein, 71 aa, BradyrhizobiumColbertium
MTKAGLVTAHAAVIPRHNPCAQCGTPIPAPDWIEPGEGRVSYLWTCHACNYRFEAVAIFGEVAAEHPPLAA

SEQ ID NO: 16014 - protein, 182 aa, BradyrhizobiumColbertium
MKILRVVALLAAGLTLPQAAFAGEAEYAEMVAAHARANGVPEALVHRVIMRESRYQPHLVGRGGTIGLMQIKLATARGVGYTGDAAGLRDPNTNLTYAVKYLAGAYRAANGDHARAVRYFAGGYYYAAKRQRQQSVQLAGMGEGNFGQPWLEPNGNPQPMFGTAPPRKLAQRVRNARAQVPH

SEQ ID NO: 16015 - protein, 341 aa, BradyrhizobiumColbertium
MLQTTKRPDSPVSIIGAGIAGAWQALLFAQAGHAVTLHERGDEAMTEATSHWAGGMLAPYCEAEVAEPIISRLGLRSLDLWRRELPDTPFNGSLVVAHPRERNDFERFARMTEDHRRLDAAGLAELEPSLEGRFRDALFFPAEGHVEPRRVLPKLHARIRAAGGTIRFCSDVTASDLANSDPEGIVIDCRGLGARDEHSELRGVKGEMILIETDEVQLARPVRLIHPRWPLYVIPREAGRFMLGATSIEAEDTGVSVRSALELLGAAYTVHPAFGEARIVEFGSGLRPAYPDNLPRIGIRGGRISVNGLYRHGFLIAPALAELTLAYVERGQIDNEVMRCA

SEQ ID NO: 16016 - protein, 65 aa, BradyrhizobiumColbertium
MRVIVNGEQREVNAASVDALLTELDYEGTHFAIALNYDVVPKSRWAETRLKAGDEIEIITPRQGG

SEQ ID NO: 16017 - protein, 260 aa, BradyrhizobiumColbertium
MVTFYGKTFASRLLIGSALYPSPAIMQDAIRASGANIVTVSLRRESAGGKTGDAFWKLIRELDVSVLPNTAGCRTVREAVTTAKLARELFGTAWIKLEVIADNDTLQPDVVGLVEAATILTKDGFEVFPYCTEDLSVANRLVDAGCRVVMPWAAPIGSAKGITNRDALRLLRERLPDITLVVDAGLGAPSHAAQALELGYDAVLLNTAIAKAADPVAMATAFRLGCEAGRTAYEAGLMNARDFASPSTPVVGTPFWHAVS

SEQ ID NO: 16018 - protein, 202 aa, BradyrhizobiumColbertium
MPYPDRFYPVVDSLQWVERLTRLGVGTIQLRAKELNDAAALQIVTDALAITKGTETKLVVNDYWRAAIVAGAQYLHLGQEDLAEADLAAIREAGLKLGISTHDDAELATALEAKPDYVALGPIFFTTLKSMRFEPQGIPKITEWKKRIGDIPLVAIGGIKFEHAAEIFAAGADSIAVVSDVIQNPDPDARVRQWLGVTKETA

SEQ ID NO: 16019 - protein, 50 aa, BradyrhizobiumColbertium
MCVRWSDGVEFSLRHCEEAATKLRSNFALVRRSNPDCLRGGAWIASLRSQ

SEQ ID NO: 16020 - protein, 632 aa, BradyrhizobiumColbertium
MNIRSNPDKTVPAVTTGPLPSSRKIFATPDAAPDLRVPLREIILSEGAGEPNLPVYDTSGPYTDPSVTIDVNAGLPRNRKAWVLERGGVEEYEGRQIKPEDNGSVSTDNAARAFSAYHKPLRGLDGHKITQLEFARAGIITKEMIYVAERENLGRKKQLERAEAALADGESFGASVPAFLTPEFVRSEIARGRAIIPCNINHSELEPMIIGRNFLTKINANIGNSAVTSSVEEEVEKMVWAIRWGADTVMDLSTGRNIHTTREWILRNSPVPIGTVPIYQALEKCNGDPVKLTWELYKDTLIEQCEQGVDYFTIHAGVRLQYIHLTASRVTGIVSRGGSIMAKWCLAHHKESFLYTHFDEICDLMRKYDVSFSLGDGLRPGSIADANDRAQFAELETLGELTKIAWDKGCQVMIEGPGHVPMHKIKINMDKQLKECGEAPFYTLGPLTTDIAPGYDHITSGIGAAMIGWFGCAMLCYVTPKEHLGLPDRNDVKTGVITYKIAAHAADLAKGHPAAQLRDDALSRARFEFRWTDQFNLGLDPETAKNFHDETLPKEAHKVAHFCSMCGPKFCSMKITQDVRDYAATLNDPNSVGMSMSGTAEDGMARMSAKFKEMGSSVYLDAEKVKESNRVL

SEQ ID NO: 16021 - protein, 443 aa, BradyrhizobiumColbertium
MAKYKRLKEIGKGSFGVVDLVEDSKGHRWAMKTFTPPTLPGVTAEELRARFEREVRYQLQIDHPNVVNIHDFDLDANPPWFVMELASCSLADELKADRTLGGDPRKPLFDILAGLEAIHEKGYKHRDLKPANVLKFNSSKKDSRYAISDFGLMSPEAGLTSTLTASNMGGGTPLYRAPECALNFKRATIQSDIYSVGAILHDIFGGGVNRLPHVELNVSGSLSPIVQRCTKQNVRRRYPNVAKLREDLYESLSKEKISFTSKEEEEVVNLLHSKEELTPDEWDRVFQQIDDNDEKGNTNHALFRSLSISQLEKLAQDAPDLFASLGKDYAKYATSGGFDFDYCDVIANRAEVFYREGEFDLKANIALALLDLGISHNRWFVERTFVRMVGTGISDDLAKRIATEIDVQGIDFSNEMDRLERSIGAQRGNLHPILREKSEAADT
